(19) United States
(12) Patent Application Publication
(10) Pub. No.: US 2008/0115246 A1
(43) Pub. Date: May 15, 2008

(54) Nucleic Acid Molecules and Other Molecules Associated with Plants

(76) Inventors: Joseph Byrum, West Des Moines, IA (US); Thomas La Rosa, Fenton, MO (US)

Correspondence Address: MONSANTO COMPANY (A&P), 800 N. LINDBERGH BOULEVARD, MAILZONE E2NA, ST. LOUIS, MO, 63167, UNITED STATES, 314-694-1000, NANCY.M.HUELSKAMP@MONSANTO.COM

(21) Appl. No.: 09/199,129

(22) Filed: Nov. 24, 1998

Related U.S. Application Data
(60) Provisional application No. 60/067,000, filed on Nov. 24, 1997.

(51) Int. Cl. A01H 5/00

(52) U.S. Cl. 800/312; 800/320.1

(57) ABSTRACT

Expressed Sequence Tags (ESTs) isolated from soybean are disclosed. The ESTs provide a unique molecular tool for the targeting and isolation of novel genes for plant protection and improvement. The disclosed ESTs have utility in the development of new strategies for understanding critical plant developmental and metabolic pathways. The disclosed ESTs have particular utility in isolating genes and promoters, identifying and mapping the genes involved in developmental and metabolic pathways, and determining gene function. Sequence homology analyses using the ESTs provided in the present invention, will result in more efficient gene screening for desirable agronomic traits. An expanding database of these select pieces of the plant genomics puzzle will quickly expand the knowledge necessary for subsequent functional validation, a key limitation in current plant biotechnology efforts.

### CROSS-REFERENCE TO RELATED APPLICATION

[0001] The present application claims priority under 35 U.S.C. § 119(e) to provisional application 60/067,000, filed Nov. 24, 1997, the entirety of which is incorporated herein by reference.

### FIELD OF THE INVENTION

[0002] The present invention is in the field of plant biochemistry. More specifically the invention relates to nucleic acid molecules that encode proteins and fragments of proteins produced in plant cells, in particular, soybean plants. The invention also relates to proteins and fragments of proteins so encoded and antibodies capable of binding the proteins. The invention also relates to methods of using the nucleic acid molecules, proteins and fragments of proteins.

### BACKGROUND OF THE INVENTION

I. Expressed Sequence Tag Nucleic Acid Molecules

[0003] Expressed sequence tags, or ESTs, are short sequences of randomly selected clones from a cDNA (or complementary DNA) library which are representative of the cDNA inserts of these randomly selected clones. McCombie, et al., Nature Genetics, 1: 124-130 (1992); Kurata, et al., Nature Genetics, 8: 365-372 (1994); Okubo, et al., Nature Genetics, 2: 173-179 (1992), all of which references are incorporated herein in their entirety.

[0004] Using conventional methodologies, cDNA libraries can be constructed from the mRNA (messenger RNA) of a given tissue or organism using poly dT primers and reverse transcriptase (Efstratiadis, et al., Cell 7:279-288 (1976), the entirety of which is herein incorporated by reference; Higuchi, et al., Proc. Natl. Acad. Sci. (U.S.A.) 73:3146-3150 (1976), the entirety of which is herein incorporated by reference; Maniatis, et al., Cell 8:163 (1976) the entirety of which is herein incorporated by reference; Land, et al., Nucleic Acids Res. 9:2251-2266 (1981), the entirety of which is herein incorporated by reference; Okayama, et al., Mol. Cell. Biol. 2:161-170 (1982), the entirety of which is herein incorporated by reference; Gubler, et al., Gene 25:263 (1983), the entirety of which is herein incorporated by reference).

[0005] Several methods may be employed to obtain full-length cDNA constructs. For example, terminal transferase can be used to add homopolymeric tails of dC residues to the free 3′ hydroxyl groups (Land, et al., Nucleic Acids Res. 9:2251-2266 (1981), the entirety of which is herein incorporated by reference). This tail can then be hybridized by a poly dG oligo which can act as a primer for the synthesis of full length second strand cDNA. Okayama and Berg, report a method for obtaining full length cDNA constructs. This method has been simplified by using synthetic primer-adapters that have both homopolymeric tails for priming the synthesis of the first and second strands and restriction sites for cloning into plasmids (Coleclough, et al., Gene 34:305-314 (1985), the entirety of which is herein incorporated by reference) and bacteriophage vectors (Krawinkel, et al., Nucleic Acids Res. 14:1913 (1986), the entirety of which is herein incorporated by reference; and Han, et al., Nucleic Acids Res. 15:6304 (1987), the entirety of which is herein incorporated by reference).

[0006] These strategies have been coupled with additional strategies for isolating rare mRNA populations. For example, a typical mammalian cell contains between 10,000 and 30,000 different mRNA sequences. Davidson, Gene Activity in Early Development, 2nd ed., Academic Press, New York (1976). The number of clones required to achieve a given probability that a low-abundance mRNA will be present in a cDNA library is N=(ln(1−P))/(ln(1−1/n)) where N is the number of clones required, P is the probability desired, and 1/n is the fractional proportion of the total mRNA that is represented by a single rare mRNA. (Sambrook, et al., Molecular Cloning: A Laboratory Manual, 2nd ed., Cold Spring Harbor Laboratory Press (1989), the entirety of which is herein incorporated by reference.).

[0007] A method to enrich preparations of mRNA for sequences of interest is to fractionate by size. One such method is to fractionate by electrophoresis through an agarose gel (Pennica, et al., Nature 301:214-221 (1983), the entirety of which is herein incorporated by reference). Another such method employs sucrose gradient centrifugation in the presence of an agent, such as methylmercuric hydroxide, that denatures secondary structure in RNA (Schweinfest, et al., Proc. Natl. Acad. Sci. (U.S.A.) 79:4997-5000 (1982), the entirety of which is herein incorporated by reference).

[0008] A frequently adopted method is to construct equalized or normalized cDNA libraries (Ko, Nucleic Acids Res. 18:5705-5711 (1990), the entirety of which is herein incorporated by reference; Patanjali, S. R. et al., Proc. Natl. Acad. Sci. (U.S.A.) 88:1943-1947 (1991), the entirety of which is herein incorporated by reference). Typically, the cDNA population is normalized by subtractive hybridization. Schnid, et al., J. Neurochem. 48:307-312 (1987) the entirety of which is herein incorporated by reference; Fargnoli, et al., Anal. Biochem. 187:364-373 (1990) the entirety of which is herein incorporated by reference; Travis, et al, Proc. Natl. Acad. Sci. (U.S.A.) 85:1696-1700 (1988) the entirety of which is herein incorporated by reference; Kato, Eur. J. Neurosci. 2:704 (1990); and Schweinfest, et al., Genet. Anal. Tech. Appl. 7:64 (1990), the entirety of which is herein incorporated by reference). Subtraction represents another method for reducing the population of certain sequences in the cDNA library. Swaroop, et al., Nucleic Acids Res. 19:1954 (1991), the entirety of which is herein incorporated by reference).

[0009] ESTs can be sequenced by a number of methods. Two basic methods may be used for DNA sequencing, the chain termination method of Sanger et al., Proc. Natl. Acad. Sci. (U.S.A.) 74: 5463-5467 (1977), the entirety of which is herein incorporated by reference and the chemical degradation method of Maxam and Gilbert, Proc. Nat. Acad. Sci. (U.S.A.) 74: 560-564 (1977), the entirety of which is herein incorporated by reference. Automation and advances in technology such as the replacement of radioisotopes with fluorescence-based sequencing have reduced the effort required to sequence DNA (Craxton, Methods, 2: 20-26 (1991), the entirety of which is herein incorporated by reference; Ju et al., Proc. Natl. Acad. Sci. (U.S.A.) 92: 4347-4351 (1995), the entirety of which is herein incorporated by reference; Tabor and Richardson, Proc. Natl. Acad. Sci. (U.S.A.) 92: 6339-6343 (1995), the entirety of which is herein incorporated by reference). Automated sequencers are available from, for example, Pharmacia Biotech, Inc., Piscataway, N.J. (Pharmacia ALF), LI-COR, Inc., Lincoln, Nebr. (LI-COR 4,000) and Millipore, Bedford, Mass. (Millipore BaseStation).

[0010] In addition, advances in capillary gel electrophoresis have also reduced the effort required to sequence DNA and such advances provide a rapid high resolution approach for sequencing DNA samples (Swerdlow and Gesteland, Nucleic Acids Res. 18:1415-1419 (1990); Smith, Nature 349:812-813 (1991); Luckey et al., Methods Enzymol. 218:154-172 (1993); Lu et al., J. Chromatog. A. 680:497-501 (1994); Carson et al., Anal. Chem. 65:3219-3226 (1993); Huang et al., Anal. Chem. 64:2149-2154 (1992); Kheterpal et al., Electrophoresis 17:1852-1859 (1996); Quesada and Zhang, Electrophoresis 17:1841-1851 (1996); Baba, Yakugaku Zasshi 117:265-281 (1997), all of which are herein incorporated by reference in their entirety).

[0011] ESTs longer than 150 bases have been found to be useful for similarity searches and mapping. (Adams, et al., Science 252:1651-1656 (1991), herein incorporated by reference.) EST sequences normally range from 150-450 bases. This is the length of sequence information that is routinely and reliably generated using single run sequence data. Typically, only single run sequence data is obtained from the cDNA library, Adams, et al., Science 252:1651-1656 (1991). Automated single run sequencing typically results in an approximately 2-3% error or base ambiguity rate. (Boguski, et al., Nature Genetics, 4:332-333 (1993), the entirety of which is herein incorporated by reference).

[0012] EST databases have been constructed or partially constructed from, for example, C. elegans (McCombrie, et al., Nature Genetics 1: 124-131 (1992), human liver cell line HepG2 (Okubo, et al., Nature Genetics 2:173-179 (1992)), human brain RNA (Adams, et al., Science 252:1651-1656 (1991); Adams, et al., Nature 355:632-635 (1992)), Arabidopsis, (Newman, et al., Plant Physiol. 106:1241-1255 (1994)); and rice (Kurata, et al., Nature Genetics 8:365-372 (1994).

II. Sequence Comparisons

[0013] A characteristic feature of a protein or DNA sequence is that it can be compared with other known protein or DNA sequences. Sequence comparisons can be undertaken by determining the similarity of the test or query sequence with sequences in publicly available or propriety databases (“similarity analysis”) or by searching for certain motifs (“intrinsic sequence analysis”)(e.g. cis elements) (Coulson, Trends in Biotechnology, 12: 76-80 (1994), the entirety of which is herein incorporated by reference; Birren, et al., Genome Analysis, 1: 543-559 (1997), the entirety of which is herein incorporated by reference).

[0014] Similarity analysis includes database search and alignment. Examples of public databases include the DNA Database of Japan (DDBJ) (http://www.ddbj.nig.ac.jp/); Genebank (http://www.ncbi.nlm.nih.gov/web/Genbank/Index.htlm), and the European Molecular Biology Laboratory Nucleic Acid Sequence Database (EMBL) (http://www.ebi.ac.uk/ebi_docs/embl_db.html). A number of different search algorithms have been developed, one example of which are the suite of programs referred to as BLAST programs. There are five implementations of BLAST, three designed for nucleotide sequences queries (BLASTN, BLASTX, and TBLASTX) and two designed for protein sequence queries (BLASTP and TBLASTN) (Coulson, Trends in Biotechnology, 12: 76-80 (1994); Birren, et al., Genome Analysis, 1: 543-559 (1997)).

[0015] BLASTN takes a nucleotide sequence (the query sequence) and its reverse complement and searches them against a nucleotide sequence database. BLASTN was designed for speed, not maximum sensitivity, and may not find distantly related coding sequences. BLASTX takes a nucleotide sequence, translates it in three forward reading frames and three reverse complement reading frames, and then compares the six translations against a protein sequence database. BLASTX is useful for sensitive analysis of preliminary (single-pass) sequence data and is tolerant of sequencing errors (Gish and States, Nature Genetics, 3: 266-272 (1993), the entirety of which is herein incorporated by reference). BLASTN and BLASTX may be used in concert for analyzing EST data (Coulson, Trends in Biotechnology, 12: 76-80 (1994); Birren, et al., Genome Analysis, 1: 543-559 (1997).

[0016] Given a coding nucleotide sequence and the protein it encodes, it is often preferable to use the protein as the query sequence to search a database because of the greatly increased sensitivity to detect more subtle relationships. This is due to the larger alphabet of proteins (20 amino acids) compared with the alphabet of nucleic acid sequences (4 bases), where it is far easier to obtain a match by chance. In addition, with nucleotide alignments, only a match (positive score) or a mismatch (negative score) is obtained, but with proteins, the presence of conservative amino acid substitutions can be taken into account. Here, a mismatch may yield a positive score if the non-identical residue has physical/chemical properties similar to the one it replaced. Various scoring matrices are used to supply the substitution scores of all possible amino acid pairs. A general purpose scoring system is the BLOSUM62 matrix (Henikoff and Henikoff, Proteins, 17: 49-61 (1993), the entirety of which is herein incorporated by reference), which is currently the default choice for BLAST programs. BLOSUM62 is tailored for alignments of moderately diverged sequences and thus may not yield the best results under all conditions. Altschul, J. Mol. Biol. 36: 290-300 (1993), the entirety of which is herein incorporated by reference, uses a combination of three matrices to cover all contingencies. This may improve sensitivity, but at the expense of slower searches. In practice, a single BLOSUM62 matrix is often used but others (PAM40 and PAM250) may be attempted when additional analysis is necessary. Low PAM matrices are directed at detecting very strong but localized sequence similarities, whereas high PAM matrices are directed at detecting long but weak alignments between very distantly related sequences.

[0017] Homologues in other organisms are available that can be used for comparative sequence analysis. Multiple alignments are performed to study similarities and differences in a group of related sequences. CLUSTAL W is a multiple sequence alignment package available that performs progressive multiple sequence alignments based on the method of Feng and Doolittle, J. Mol. Evol. 25: 351-360 (1987), the entirety of which is herein incorporated by reference. Each pair of sequences is aligned and the distance between each pair is calculated; from this distance matrix, a guide tree is calculated, and all of the sequences are progressively aligned based on this tree. A feature of the program is its sensitivity to the effect of gaps on the alignment; gap penalties are varied to encourage the insertion of gaps in probable loop regions instead of in the middle of structured regions. Users can specify gap penalties, choose between a number of scoring matrices, or supply their own scoring matrix for both the pairwise alignments and the multiple alignments. CLUSTAL W for UNIX and VMS systems is available at: ftp.ebi.ac.uk. Another program is MACAW (Schuler et al., Proteins, Struct. Func. Genet, 9:180-190 (1991), the entirety of which is herein incorporated by reference, for which both Macintosh and Microsoft Windows versions are available. MACAW uses a graphical interface, provides a choice of several alignment algorithms, and is available by anonymous ftp at: ncbi.nlm.nih.gov (directory/pub/macaw).

[0018] Sequence motifs are derived from multiple alignments and can be used to examine individual sequences or an entire database for subtle patterns. With motifs, it is sometimes possible to detect distant relationships that may not be demonstrable based on comparisons of primary sequences alone. Currently, the largest collection of sequence motifs in the world is PROSHE (Bairoch and Bucher, Nucleic Acid Research, 22: 3583-3589 (1994), the entirety of which is herein incorporated by reference.) PROSITE may be accessed via either the ExPASy server on the World Wide Web or anonymous ftp site. Many commercial sequence analysis packages also provide search programs that use PROSITE data.

[0019] A resource for searching protein motifs is the BLOCKS E-mail server developed by S. Henikoff, Trends Biochem Sci., 18:267-268 (1993), the entirety of which is herein incorporated by reference; Henikoff and Henikoff, Nucleic Acid Research, 19:6565-6572 (1991), the entirety of which is herein incorporated by reference; Henikoff and Henikoff, Proteins, 17: 49-61 (1993). BLOCKS searches a protein or nucleotide sequence against a database of protein motifs or “blocks.” Blocks are defined as short, ungapped multiple alignments that represent highly conserved protein patterns. The blocks themselves are derived from entries in PROSITE as well as other sources. Either a protein or nucleotide query can be submitted to the BLOCKS server; if a nucleotide sequence is submitted, the sequence is translated in all six reading frames and motifs are sought in these conceptual translations. Once the search is completed, the server will return a ranked list of significant matches, along with an alignment of the query sequence to the matched BLOCKS entries.

[0020] Conserved protein domains can be represented by two-dimensional matrices, which measure either the frequency or probability of the occurrences of each amino acid residue and deletions or insertions in each position of the domain. This type of model, when used to search against protein databases, is sensitive and usually yields more accurate results than simple motif searches. Two popular implementations of this approach are profile searches (such as GCG program ProfileSearch) and Hidden Markov Models (HMMs)(Krough et al., J. Mol. Biol. 235:1501-1531 (1994); Eddy, Current Opinion in Structural Biology 6:361-365 (1996), both of which are herein incorporated by reference in their entirety). In both cases, a large number of common protein domains have been converted into profiles, as present in the PROSITE library, or HHM models, as in the Pfam protein domain library (Sonnhammer et al., Proteins 28:405-420 (1997), the entirety of which is herein incorporated by reference). Pfam contains more than 500 HMM models for enzymes, transcription factors, signal transduction molecules, and structural proteins. Protein databases can be queried with these profiles or HMM models, which will identify proteins containing the domain of interest. For example, HMMSW or HMMFS, two programs in a public domain package called HMMER (Sonnhammer et al., Proteins 28:405-420 (1997)) can be used.

[0021] PROSITE and BLOCKS represent collected families of protein motifs. Thus, searching these databases entails submitting a single sequence to determine whether or not that sequence is similar to the members of an established family. Programs working in the opposite direction compare a collection of sequences with individual entries in the protein databases. An example of such a program is the Motif Search Tool, or MoST (Tatusov et al. Proc. Natl. Acad. Sci. 91: 12091-12095 (1994), the entirety of which is herein incorporated by reference.) On the basis of an aligned set of input sequences, a weight matrix is calculated by using one of four methods (selected by the user); a weight matrix is simply a representation, position by position in an alignment, of how likely a particular amino acid will appear. The calculated weight matrix is then used to search the databases. To increase sensitivity, newly found sequences are added to the original data set, the weight matrix is recalculated, and the search is performed again. This procedure continues until no new sequences are found.

### SUMMARY OF THE INVENTION

[0022] The present invention provides a substantially purified nucleic acid molecule that encodes a soybean protein or fragment thereof comprising a sequence selected from the group consisting of SEQ ID NO: 1 through SEQ ID NO: 5521.

[0023] The present invention also provides one or more substantially purified nucleic acid molecule selected from the group consisting of a nucleic acid molecule comprising SEQ ID NO: 1 or complement thereof through SEQ ID NO:5521 or complement thereof.

[0024] The present invention also provides a substantially purified soybean protein or fragment thereof, wherein said soybean protein is encoded by a nucleic acid molecule that comprises a nucleic acid sequence selected from the group consisting of SEQ ID NO: 1 through SEQ ID NO: 5521.

[0025] The present invention further provides a substantially purified protein, peptide, or fragment thereof encoded by a nucleic acid sequence which specifically hybridizes to a nucleic acid molecule selected from the group consisting of SEQ ID NO: 1 through SEQ ID NO:5521.

[0026] The present invention further provides a substantially purified antibody capable of specifically binding to a protein or fragment thereof encoded by a nucleic acid sequence which specifically hybridizes to a nucleic acid molecule selected from the group consisting of SEQ ID NO:1 through SEQ ID NO:5521.

[0027] The present invention also provides a transformed plant transformed to contain a nucleic acid molecule which comprises: (A) an exogeneous promoter region which functions in plant cells to cause the production of an mRNA molecule; which is linked to (B) a structural nucleic acid molecule, wherein said structural nucleic acid molecule comprises a nucleic acid molecule that encodes a protein, peptide, or fragment thereof which hybridizes to SEQ ID NO: 1 through SEQ ID NO:5521 expressed in an effective amount to produce a desirable agronomic effect; which is linked to (C) a 3′ non-translated sequence that functions in plant cells to cause the termination of transcription and the addition of polyadenylated ribonucleotides to the 3′ end of the mRNA sequence.

[0028] The present invention also provides a transformed plant cell containing a nucleic acid molecule whose non-transcribed strand encodes a protein or fragment thereof, wherein the transcribed strand of said nucleic acid is complementary to a nucleic acid molecule that encodes a protein or fragment thereof expressed in an effective amount to produce a desirable agronomic effect.

[0029] The present invention also provides bacterial, viral, microbial, and plant cells comprising the above mentioned elements (a), (b) and (c).

[0030] The present invention also provides a method of producing a plant containing one or more proteins encoded by sequences comprising SEQ ID NO: 1 or complement thereof through SEQ ID NO:5521 or complement thereof, expressed in a sufficient amount and/or fashion to produce a desirable agronomic effect.

[0031] In accomplishing the foregoing, there is provided, in accordance with one aspect of the present invention, methods of producing genetically transformed plants, comprising the steps of:
[0032] (a) inserting into the genome of a plant cell a recombinant, double-stranded DNA molecule comprising
   [0033] (i) a promoter which functions in plant cells to cause the production of an RNA sequence,
   [0034] (ii) a structural DNA sequence that causes the production of an RNA sequence which encodes a desired protein.
   [0035] (iii) a 3′ non-translated DNA sequence which functions in plant cells to cause the addition of polyadenylated nucleotides to the 3′ end of RNA sequence; where the promoter is homologous or heterologous with respect to the coding sequence and adapted to cause sufficient expression of a protein in desired plant tissues to enhance the agronomic utility of a plant transformed with said gene.
[0036] (b) obtaining a transformed plant cell with said nucleic acid molecule that encodes one or more proteins, wherein said nucleic acid molecule is transcribed and results in expression of said protein(s); and
[0037] (c) regenerating from the transformed plant cell a genetically transformed plant The present invention also encompasses differentiated plants, seeds, and progeny comprising said transformed plant cells and which exhibit novel properties of agronomic significance.

[0038] The present invention also provides a method of producing a plant containing reduced levels of a protein comprising: (A) transforming a plant cell with a nucleic acid molecule that encodes a protein, wherein said nucleic acid molecule is transcribed and results in co-suppression of endogenous protein synthesis activity, and (B) regenerating plants and producing subsequent progeny from the said transformed plant.

[0039] The present invention also provides a method of determining an association between a polymorphism and a plant trait comprising: (A) hybridizing a nucleic acid molecule specific for a polymorphism to genetic material of a plant, wherein said nucleic acid molecule is selected from the group consisting of SEQ ID NO: 1 through SEQ ID NO:5521; and (B) calculating the degree of association between the polymorphism and the plant trait.

[0040] The present invention also provides a method of isolating a genetic region, or nucleic acid that encodes a protein, peptide, or fragment thereof comprising: (A) incubating under conditions permitting nucleic acid hybridization: a marker nucleic acid molecule, preferably an EST, with a complementary nucleic acid molecule obtained from a plant cell or plant tissue; (B) permitting hybridization between said marker nucleic acid molecule, preferably an EST, and said complementary nucleic acid molecule obtained from said plant cell or plant tissue; and (C) isolating said complementary nucleic acid molecule.

[0041] The present invention also provides a method for determining a level or pattern in a plant cell of a protein in a plant comprising: (A) incubating, under conditions permitting nucleic acid hybridization, a marker nucleic acid molecule, the marker nucleic acid molecule selected from the group of marker nucleic acid molecules which specifically hybridize to a nucleic acid molecule having the nucleic acid sequence selected from the group consisting of SEQ ID NO: 1 through SEQ ID NO: 5521 or complement thereof, with a complementary nucleic acid molecule obtained from the plant cell or plant tissue, wherein nucleic acid hybridization between the marker nucleic acid molecule and the complementary nucleic acid molecule obtained from the plant cell or plant tissue permits the detection of an mRNA for the enzyme; (B) permitting hybridization between the marker nucleic acid molecule and the complementary nucleic acid molecule obtained from the plant cell or plant tissue; and (C) detecting the level or pattern of the complementary nucleic acid, wherein the detection of the complementary nucleic acid is predictive of the level or pattern of the protein.

[0042] The present invention also provides a method for determining the level or pattern of protein synthesis in a plant cell or plant tissue comprising: (A) incubating under conditions permitting nucleic acid hybridization: a marker nucleic acid molecule, the marker nucleic acid molecule comprising a nucleotide sequence selected from the group consisting of a nucleic acid molecule comprising SEQ ID NO: 1 or complement thereof through SEQ ID NO:5521 or complement thereof, with a complementary nucleic acid molecule obtained from a plant cell or plant tissue, wherein nucleic acid hybridization between the marker nucleic acid molecule, and the complementary nucleic acid molecule obtained from the plant cell or plant tissue permits the detection of a particular protein synthesis; (B) permitting hybridization between the marker nucleic acid molecule and the complementary nucleic acid molecule obtained from the plant cell or plant tissue; and (C) detecting the level or pattern of the complementary nucleic acid, wherein the detection of said complementary nucleic acid is predictive of the level or pattern of the protein synthesis.

[0043] The present invention also provides a method for determining a level or pattern of protein synthesis in a plant cell or plant tissue under evaluation for suspected protein synthesis which comprises assaying the concentration of a molecule, whose concentration is dependent upon the expression of a gene, the gene having a nucleic acid sequence which specifically hybridizes to a protein synthesis marker nucleic acid molecule, the molecule being present in a plant cell or plant tissue, in comparison to the concentration of that molecule present in a plant cell or plant tissue with a known level or pattern of protein synthesis, wherein an assayed concentration of the molecule is compared to the assayed concentration of the molecule in a plant cell or plant tissue with a known level or pattern of protein synthesis.

[0044] The present invention also provides a method of determining a mutation in a plant whose presence is predictive of a mutation affecting a level or pattern of a protein comprising the steps: (A) incubating, under conditions permitting nucleic acid hybridization, a marker nucleic acid, the marker nucleic acid selected from the group of marker nucleic acid molecules which specifically hybridize to a nucleic acid molecule consisting of the nucleic acid sequence selected from the group consisting of SEQ ID NO: 1 through SEQ ID NO: 5521 or complement thereof and a complementary nucleic acid molecule obtained from the plant, wherein nucleic acid hybridization between the marker nucleic acid molecule and the complementary nucleic acid molecule obtained from the plant permits the detection of a polymorphism whose presence is predictive of a mutation affecting the level or pattern of the protein in the plant; (B) permitting hybridization between the marker nucleic acid molecule and the complementary nucleic acid molecule obtained from the plant; and (C) detecting the presence of the polymorphism, wherein the detection of the polymorphism is predictive of the mutation.

[0045] The present invention also provides a method for determining a mutation in a plant whose presence is predictive of a mutation affecting the level or pattern of protein synthesis comprising the steps: (A) incubating under conditions permitting nucleic acid hybridization: a marker nucleic acid molecule, the marker nucleic acid molecule comprising a nucleic acid molecule that is linked to gene, the gene having a nucleic acid sequence which specifically hybridizes to a sequence selected from the group consisting of SEQ ID NO: 1 through SEQ ID NO:5521 and complements thereof and which encodes for a protein, and a complementary nucleic acid molecule obtained from a plant tissue or plant cell of the plant, wherein nucleic acid hybridization between the marker nucleic acid molecule and the complementary nucleic acid molecule obtained from the plant permits the detection of a polymorphism whose presence is predictive of a mutation affecting said level or pattern of a protein synthesis in the plant; (B) permitting hybridization between said marker nucleic acid molecule and said complementary nucleic acid molecule obtained from said plant; and; (C) detecting the presence of the polymorphism, wherein the detection of the polymorphism is predictive of the mutation.

[0046] The present invention also provides a method for reducing expression of a protein in a plant cell, the method comprising: growing a transformed plant cell containing a nucleic acid molecule whose non-transcribed strand encodes a protein or fragment thereof, wherein the transcribed strand of said nucleic acid is complementary to a nucleic acid molecule that encodes the protein in said plant cell, and whereby the strand that is complementary to the nucleic acid molecule that encodes the protein reduces or depresses expression of the protein.

[0047] Thus, the present invention provides soybean ESTs for use as molecular tags to isolate genetic regions (i.e. promoters and flanking sequences), isolate genes, map genes, and determine gene function. The present invention further provides soybean ESTs for use in determining if genes are members of a particular gene family.

[0048] The present invention also provides a method of obtaining full length genes using soybean ESTs.

[0049] The present invention also provides a method of isolating promoters and flanking sequences using soybean ESTs.

[0050] The present invention also provides soybean ESTs for use in marker-assisted breeding programs.

[0051] The present invention also provides a method of identifying tissues comprising hybridizing nucleic acids from the tissue with soybean ESTs

[0052] The present invention also provides a method for production of antibodies targeted against the proteins, peptides, or fragments produced by the disclosed ESTs or variants or derivatives thereof.

[0053] The present invention also provides a method for the transformation and regeneration of plants comprising sequences hybridizable to the disclosed ESTs.

[0054] The present invention also provides a method of modifying plant protein expression by inserting in a chimeric gene sense or antisense constructs of the soybean ESTs.

### DETAILED DESCRIPTION OF THE INVENTION

Agents

[0055] (a) Nucleic Acid Molecules

[0056] Agents of the present invention include nucleic acid molecules and more specifically EST nucleic acid molecules or nucleic acid fragment molecules thereof. Fragment EST nucleic acid molecules may encode significant portion(s) of, or indeed most of, the EST nucleic acid molecule. Alternatively, the fragments may comprise smaller oligonucleotides (having from about 15 to about 250 nucleotide residues, and more preferably, about 15 to about 30 nucleotide residues).

[0057] As used herein, an agent, be it a naturally occurring molecule or otherwise may be “substantially purified,” if desired, such that one or more molecules that is or may be present in a naturally occurring preparation containing that molecule will have been removed or will be present at a lower concentration than that at which it would normally be found.

[0058] The agents of the present invention will preferably be “biologically active” with respect to either a structural attribute, such as the capacity of a nucleic acid to hybridize to another nucleic acid molecule, or the ability of a protein to be bound by antibody (or to compete with another molecule for such binding). Alternatively, such an attribute may be catalytic, and thus involve the capacity of the agent to mediate a chemical reaction or response.

[0059] The agents of the present invention may also be recombinant. As used herein, the term recombinant means any agent (e.g. DNA, peptide etc.), that is, or results, however indirect, from human manipulation of a nucleic acid molecule.

[0060] It is understood that the agents of the present invention may be labeled with reagents that facilitate detection of the agent (e.g. fluorescent labels (Prober, et al., Science 238:336-340 (1987); Albarella et al., EP 144914, chemical labels (Sheldon et al., U.S. Pat. No. 4,582,789; Albarella et al., U.S. Pat. No. 4,563,417, modified bases (Miyoshi et al., EP 119448, all of which are hereby incorporated by reference in their entirety).

[0061] It is further understood, that the present invention provides bacterial, viral, microbial, and plant cells comprising the agents of the present invention.

[0062] EST nucleic acid molecules or fragment EST nucleic acid molecules are capable of specifically hybridizing to other nucleic acid molecules under certain circumstances. As used herein, two nucleic acid molecules are said to be capable of specifically hybridizing to one another if the two molecules are capable of forming an anti-parallel, double-stranded nucleic acid structure. A nucleic acid molecule is said to be the “complement” of another nucleic acid molecule if they exhibit complete complementarity. As used herein, molecules are said to exhibit “complete complementarity” when every nucleotide of one of the molecules is complementary to a nucleotide of the other. Two molecules are said to be “minimally complementary” if they can hybridize to one another with sufficient stability to permit them to remain annealed to one another under at least conventional “low-stringency” conditions. Similarly, the molecules are said to be “complementary” if they can hybridize to one another with sufficient stability to permit them to remain annealed to one another under conventional “high-stringency” conditions. Conventional stringency conditions are described by Sambrook, et al., In: Molecular Cloning, A Laboratory Manual, 2nd Edition, Cold Spring Harbor Press, Cold Spring Harbor, N.Y. (1989), and by Haymes, et al. In: Nucleic Acid Hybridization, A Practical Approach, IRL Press, Washington, D.C. (1985), the entirety of which is herein incorporated by reference. Departures from complete complementarity are therefore permissible, as long as such departures do not completely preclude the capacity of the molecules to form a double-stranded structure. Thus, in order for an EST nucleic acid molecule or fragment EST nucleic acid molecule to serve as a primer or probe it need only be sufficiently complementary in sequence to be able to form a stable double-stranded structure under the particular solvent and salt concentrations employed.

[0063] Appropriate stringency conditions which promote DNA hybridization are, for example, 6.0× sodium chloride/sodium citrate (SSC) at about 45° C., followed by a wash of 2.0×SSC at 50° C., are known to those skilled in the art or can be found in Current Protocols in Molecular Biology, John Wiley & Sons, N.Y. (1989), 6.3.1-6.3.6. For example, the salt concentration in the wash step can be selected from a low stringency of about 2.0×SSC at 50° C. to a high stringency of about 0.2×SSC at 50° C. In addition, the temperature in the wash step can be increased from low stringency conditions at room temperature, about 22° C., to high stringency conditions at about 65° C. Both temperature and salt may be varied, or either the temperature or the salt concentration may be held constant while the other variable is changed.

[0064] In a preferred embodiment, a nucleic acid of the present invention will specifically hybridize to one or more of the nucleic acid molecules set forth in SEQ ID NO: 1 through SEQ ID NO: 5521 or complements thereof under moderately stringent conditions, for example at about 2.0×SSC and about 65° C.

[0065] In a particularly preferred embodiment, a nucleic acid of the present invention will include those nucleic acid molecules that specifically hybridize to one or more of the nucleic acid molecules set forth in SEQ ID NO: 1 through SEQ ID NO: 5521 or complements thereof under high stringency conditions.

[0066] In one aspect of the present invention, the nucleic acid molecules of the present invention have one or more of the nucleic acid sequences set forth in SEQ ID NO: 1 through to SEQ ID NO:5521 or complements thereof. In another aspect of the present invention, one or more of the nucleic acid molecules of the present invention share between 100% and 90% sequence identity with one or more of the nucleic acid sequences set forth in SEQ ID NO: 1 through to SEQ ID NO:5521 or complements thereof. In a further aspect of the present invention, one or more of the nucleic acid molecules of the present invention share between 100% and 95% sequence identity with one or more of the nucleic acid sequences set forth in SEQ ID NO: 1 through to SEQ ID NO:5521 or complements thereof. In a more preferred aspect of the present invention, one or more of the nucleic acid molecules of the present invention share between 100% and 98% sequence identity with one or more of the nucleic acid sequences set forth in SEQ ID NO: 1 through to SEQ ID NO:5521 or complements thereof. In an even more preferred aspect of the present invention, one or more of the nucleic acid molecules of the present invention share between 100% and 99% sequence identity with one or more of the sequences set forth in SEQ ID NO: 1 through to SEQ ID NO:5521 or complements thereof. In a further, even more preferred aspect of the present invention, one or more of the nucleic acid molecules of the present invention exhibit 100% sequence identity with one or more nucleic acid molecules present within the cDNA library SOYMON001, herein designated SOYMON001 (Monsanto Company, St. Louis, Mo., United States of America).

[0067] The degeneracy of the genetic code, which allows different nucleic acid sequences to code for the same protein or peptide, is known in the literature. (U.S. Pat. No. 4,757,006, the entirety of which is herein incorporated by reference). As used herein a nucleic acid molecule is degenerate of another nucleic acid molecule when the nucleic acid molecules encode for the same amino acid sequences but comprise different nucleotide sequences. An aspect of the present invention is that the nucleic acid molecules of the present invention include nucleic acid molecules that are degenerate of those set forth in SEQ ID NO: 1 through to SEQ ID NO:5521 or complements thereof. As used herein, nucleic acid molecules are said to be capable of specifically hybridizing to one another if the two molecules are capable of forming an anti-parallel, double-stranded nucleic acid structure under conditions (e.g. salt and temperature) that permit hybridization of sequences that exhibit 90% sequence identity or greater with each other and exhibit this identity for at least a contiguous 50 base pairs of the nucleic acid molecules.

[0068] (b) Protein and Peptide Molecules

[0069] A class of agents comprises one or more of the protein or peptide molecules encoded by SEQ ID NO: 1 through SEQ ID NO:5521 or complements thereof or one or more of the protein or fragment thereof or peptide molecules encoded by other nucleic acid agents of the present invention. As used herein, the term “protein molecule” or “peptide molecule” includes any molecule that comprises five or more amino acids. It is well know in the art that proteins may undergo modification, including post-translational modifications, such as, but not limited to, disulfide bond formation, glycosylation, phosphorylation, or oligomerization. Thus, as used herein, the term “protein molecule” or “peptide molecule” includes any protein molecule that is modified by any biological or non-biological process. The terms “amino acid” and “amino acids” refer to all naturally occurring L-amino acids. This definition is meant to include norleucine, ornithine, homocysteine, and homoserine.

[0070] One or more of the protein or fragment of peptide molecules may be produced via chemical synthesis, or more preferably, by expressing in a suitable bacterial or eukaryotic host. Suitable methods for expression are described by Sambrook, et al., (In: Molecular Cloning, A Laboratory Manual, 2nd Edition, Cold Spring Harbor Press, Cold Spring Harbor, N.Y. (1989)), or similar texts.

[0071] A “protein fragment” is a peptide or polypeptide molecule whose amino acid sequence comprises a subset of the amino acid sequence of that protein. A protein or fragment thereof that comprises one or more additional peptide regions not derived from that protein is a “fusion” protein. Such molecules may be derivatized to contain carbohydrate or other moieties (such as keyhole limpet hemocyanin, etc.). Fusion protein or peptide molecule of the present invention are preferably produced via recombinant means.

[0072] Another class of agents comprise protein or peptide molecules encoded by SEQ ID NO: 1 through SEQ ID NO:5521 or complements thereof or, fragments or fusions thereof in which non-essential, or not relevant, amino acid residues have been added, replaced, or deleted. An example of such a homologue is the homologue protein of all non-soybean plant species, including but not limited to alfalfa, Arabidopsis, barley, Brassica, broccoli, cabbage, citrus, cotton, garlic, oat, oilseed rape, onion, canola, flax, maize, an ornamental plant, pea, peanut, pepper, potato, rice, rye, sorghum, strawberry, sugarcane, sugarbeet, tomato, wheat, poplar, pine, fir, eukalyptus, apple, lettuce, peas, lentils, grape, banana, tea, turf grasses, etc. Particularly preferred non-soybean plants to utilize for the isolation of homologues would include alfalfa, Arabidopsis, barley, cotton, corn, oat, oilseed rape, rice, corn, canola, ornamentals, sugarcane, sugarbeet, tomato, potato, wheat, and turf grasses. Such a homologue can be obtained by any of a variety of methods. Most preferably, as indicated above, one or more of the disclosed sequences (SEQ ID NO: 1 through SEQ ID NO:5521 or complements thereof) will be used to define a pair of primers that may be used to isolate the homologue-encoding nucleic acid molecules from any desired species. Such molecules can be expressed to yield homologues by recombinant means.

[0073] (c) Antibodies

[0074] One aspect of the present invention concerns antibodies, single-chain antigen binding molecules, or other proteins that specifically bind to one or more of the protein or peptide molecules of the present invention and their homologues, fusions or fragments. Such antibodies may be used to quantitatively or qualitatively detect the protein or peptide molecules of the present invention. As used herein, an antibody or peptide is said to “specifically bind” to a protein or peptide molecule of the present invention if such binding is not competitively inhibited by the presence of non-related molecules.

[0075] Nucleic acid molecules that encode all or part of the protein of the present invention can be expressed, via recombinant means, to yield protein or peptides that can in turn be used to elicit antibodies that are capable of binding the expressed protein or peptide. Such antibodies may be used in immunoassays for that protein. Such protein-encoding molecules, or their fragments may be a “fusion” molecule (i.e., a part of a larger nucleic acid molecule) such that, upon expression, a fusion protein is produced. It is understood that any of the nucleic acid molecules of the present invention may be expressed, via recombinant means, to yield proteins or peptides encoded by these nucleic acid molecules.

[0076] The antibodies that specifically bind proteins and protein fragments of the present invention may be polyclonal or monoclonal, and may comprise intact immunoglobulins, or antigen binding portions of immunoglobulins (such as (F(ab′), F(ab′)₂) fragments, or single-chain immunoglobulins producible, for example, via recombinant means). It is understood that practitioners are familiar with the standard resource materials which describe specific conditions and procedures for the construction, manipulation and isolation of antibodies (see, for example, Harlow and Lane, In Antibodies: A Laboratory Manual, Cold Spring Harbor Press, Cold Spring Harbor, N.Y. (1988), the entirety of which is herein incorporated by reference).

[0077] Murine monoclonal antibodies are particularly preferred. BALB/c mice are preferred for this purpose, however, equivalent strains may also be used. The animals are preferably immunized with approximately 25 μg of purified protein (or fragment thereof) that has been emulsified a suitable adjuvant (such as TiterMax adjuvant (Vaxcel, Norcross, Ga.)). Immunization is preferably conducted at two intramuscular sites, one intraperitoneal site, and one subcutaneous site at the base of the tail. An additional i.v. injection of approximately 25 μg of antigen is preferably given in normal saline three weeks later. After approximately 11 days following the second injection, the mice may be bled and the blood screened for the presence of anti-protein or peptide antibodies. Preferably, a direct binding Enzyme-Linked Immunoassay (ELISA) is employed for this purpose.

[0078] More preferably, the mouse having the highest antibody titer is given a third i.v. injection of approximately 25 μg of the same protein or fragment. The splenic leukocytes from this animal may be recovered 3 days later, and are then permitted to fuse, most preferably, using polyethylene glycol, with cells of a suitable myeloma cell line (such as, for example, the P3X63Ag8.653 myeloma cell line). Hybridoma cells are selected by culturing the cells under “HAT” (hypoxanthine-aminopterin-thymine) selection for about one week. The resulting clones may then be screened for their capacity to produce monoclonal antibodies (“mAbs), preferably by direct ELISA.

[0079] In one embodiment, anti-protein or peptide monoclonal antibodies are isolated using a fusion of a protein, protein fragment, or peptide of the present invention, or conjugate of a protein, protein fragment, or peptide of the present invention, as immunogens. Thus, for example, a group of mice can be immunized using a fusion protein emulsified in Freund's complete adjuvant (e.g. approximately 50 μg of antigen per immunization). At three week intervals, an identical amount of antigen is emulsified in Freund's incomplete adjuvant and used to immunize the animals. Ten days following the third immunization, serum samples are taken and evaluated for the presence of antibody. If antibody titers are too low, a fourth booster can be employed. Polysera capable of binding the protein or peptide can also be obtained using this method.

[0080] In a preferred procedure for obtaining monoclonal antibodies, the spleens of the above-described immunized mice are removed, disrupted, and immune splenocytes are isolated over a ficoll gradient. The isolated splenocytes are fused, using polyethylene glycol with BALB/c-derived HGPRT (hypoxanthine guanine phosphoribosyl transferase) deficient P3×63xAg8.653 plasmacytoma cells. The fused cells are plated into 96-well microtiter plates and screened for hybridoma fusion cells by their capacity to grow in culture medium supplemented with hypothanthine, aminopterin and thymidine for approximately 2-3 weeks.

[0081] Hybridoma cells that arise from such incubation are preferably screened for their capacity to produce an immunoglobulin that binds to a protein of interest. An indirect ELISA may be used for this purpose. In brief, the supernatants of hybridomas are incubated in microtiter wells that contain immobilized protein. After washing, the titer of bound immunoglobulin can be determined using, for example, a goat anti-mouse antibody conjugated to horseradish peroxidase. After additional washing, the amount of immobilized enzyme is determined (for example through the use of a chromogenic substrate). Such screening is performed as quickly as possible after the identification of the hybridoma in order to ensure that a desired clone is not overgrown by non-secreting neighbors. Desirably, the fusion plates are screened several times since the rates of hybridoma growth vary. In a preferred sub-embodiment, a different antigenic form of immunogen may be used to screen the hybridoma. Thus, for example, the splenocytes may be immunized with one immunogen, but the resulting hybridomas can be screened using a different immunogen. It is understood that any of the protein or peptide molecules of the present invention may be used to raise antibodies.

[0082] As discussed below, such antibody molecules or their fragments may be used for diagnostic purposes. Where the antibodies are intended for diagnostic purposes, it may be desirable to derivatize them, for example with a ligand group (such as biotin) or a detectable marker group (such as a fluorescent group, a radioisotope or an enzyme).

[0083] The ability to produce antibodies that bind the protein or peptide molecules of the present invention permits the identification of mimetic compounds of those molecules. A “mimetic compound” is a compound that is not that compound, or a fragment of that compound, but which nonetheless exhibits an ability to specifically bind to antibodies directed against that compound.

[0084] It is understood that any of the agents of the present invention can be substantially purified and/or be biologically active and/or recombinant.

[0085] Uses of the Agents of the Invention

[0086] The nucleic acid molecules and fragments thereof of the present invention were isolated from soybean leaf tissue. Leaves are the carbohydrate factories of crop plants, therefore, the ESTs of the present invention will find great use in the isolation of a variety of agronomically significant genes, including but not limited to genes that are necessary for the interception and transformation of light energy via photosynthesis linked with plant growth, quality, and yield. Genes isolated utilizing the disclosed ESTs would also be critical in pathways including but not limited to a pathway such as nitrogen metabolism linked to fruiting and mobilization and distribution of nitrogen.

[0087] Nucleic acid molecules and fragments thereof of the present invention may be employed to obtain other nucleic acid molecules. Such molecules include the nucleic acid molecule of other plants or other organisms (e.g., alfalfa, rice, potato, cotton, oat, rye, barley, maize, wheat, Arabidopsis, Brassica, etc.) including the nucleic acid molecules that encode, in whole or in part, protein homologues of other plant species or other organisms, and sequences of genetic elements such as promoters and transcriptional regulatory elements. Such molecules can be readily obtained by using the above-described nucleic acid molecules or fragments thereof to screen cDNA or genomic libraries obtained from such plant species. Methods for forming such libraries are well known in the art. Such homologue molecules may differ in their nucleotide sequences from those found in one or more of SEQ ID NO: 1 through SEQ ID NO:5521 or complements thereof because complete complementarity is not needed for stable hybridization. The nucleic acid molecules of the present invention therefore also include molecules that, although capable of specifically hybridizing with the nucleic acid molecules may lack “complete complementarity.”

[0088] Any of a variety of methods may be used to obtain one or more of the above-described nucleic acid molecules (Zamechik et al., Proc. Natl. Acad. Sci. (U.S.A.) 83:4143-4146 (1986), the entirety of which is herein incorporated by reference; Goodchild et al., Proc. Natl. Acad. Sci. (U.S.A.) 85:5507-5511 (1988), the entirety of which is herein incorporated by reference; Wickstrom et al., Proc. Natl. Acad. Sci. (U.S.A.) 85:1028-1032 (1988), the entirety of which is herein incorporated by reference; Holt, et al., Molec. Cell. Biol. 8:963-973 (1988), the entirety of which is herein incorporated by reference; Gerwirtz, et al., Science 242:1303-1306 (1988), the entirety of which is herein incorporated by reference); Anfossi, et al., Proc. Natl. Acad. Sci. (U.S.A.) 86:3379-3383 (1989), the entirety of which is herein incorporated by reference; Becker, et al., EMBO J. 8:3685-3691 (1989); the entirety of which is herein incorporated by reference). Automated nucleic acid synthesizers may be employed for this purpose. In lieu of such synthesis, the disclosed nucleic acid molecules may be used to define a pair of primers that can be used with the polymerase chain reaction (Mullis, et al., Cold Spring Harbor Symp. Quant. Biol. 51:263-273 (1986); Erlich et al., EP 50,424; EP 84,796, EP 258,017, EP 237,362; Mullis, EP 201,184; Mullis et al., U.S. Pat. No. 4,683,202; Erlich, U.S. Pat. No. 4,582,788; and Saiki, R. et al., U.S. Pat. No. 4,683,194, all of which are hereby incorporated by reference in their entirety) to amplify and obtain any desired nucleic acid molecule or fragment.

[0089] Promoter sequence(s) and other genetic elements including but not limited to transcriptional regulatory elements associated with one or more of the disclosed nucleic acid sequences can also be obtained using the disclosed nucleic acid sequences provided herein. In one embodiment, such sequences are obtained by incubating EST nucleic acid molecules or preferably fragments thereof with members of genomic libraries (e.g. Zea mays and soybean) and recovering clones that hybridize to the EST nucleic acid molecule or fragment thereof. In a second embodiment, methods of “chromosome walking,” or inverse PCR may be used to obtain such sequences (Frohman, et al., Proc. Natl. Acad. Sci. (U.S.A.) 85:8998-9002 (1988); Ohara, et al., Proc. Natl. Acad. Sci. (U.S.A.) 86: 5673-5677 (1989); Pang et al., Biotechniques, 22(6); 1046-1048 (1977); Huang et al., Methods Mol. Biol. 69: 89-96 (1977); Hartl et al., Methods Mol. Biol. 58: 293-301 (1996), all of which are hereby incorporated by reference in their entirety). In one embodiment, the disclosed ESTs are used to identify cDNAs whose analogous genes contain promoters with desirable expression patterns. The ESTs isolated from the library of the present invention are used to isolate promoters of tissue-enhanced, tissue-specific, developmentally- or environmentally-regulated expression profiles. Isolation and functional analysis of the 5′ flanking promoter sequences of these genes from genomic libraries, for example, using genomic screening methods and PCR techniques would result in the isolation of useful promoters and transcriptional regulatory elements. These methods are known to those of skill in the art and have been described (See for example Birren et al., Genome Analysis: Analyzing DNA, 1, (1997), Cold Spring Harbor Laboratory Press, Cold Spring Harbor, N.Y., the entirety of which is herein incorporated by reference). Promoters obtained utilizing the ESTs of the present invention could also be modified to affect their control characteristics. Examples of such modifications would include but are not limited to enhancer sequences as reported by Kay et al., Science 236:1299 (1987), herein incorporated by reference in its entirety. Such genetic elements could be used to enhance gene expression of new and existing traits for crop improvements.

[0090] The nucleic acid molecules of the present invention may be used to isolate promoters of tissue enhanced. tissue specific, cell-specific, cell-type, developmentally or environmentally regulated expression profiles. Isolation and functional analysis of the 5′ flanking promoter sequences of these genes from genomic libraries, for example, using genomic screening methods and PCR techniques would result in the isolation of useful promoters and transcriptional regulatory elements. These methods are known to those of skill in the art and have been described (See, for example, Birren et. al., Genome Analysis: Analyzing DNA, 1, Cold Spring Harbor Laboratory Press, Cold Spring Harbor, N.Y. (1997), the entirety of which is herein incorporated by reference.). Promoters obtained utilizing the nucleic acid molecules of the present invention could also be modified to affect their control characteristics. Examples of such modifications would include but are not limited to enhancer sequences as reported by Kay, et al Science 236:1299 (1987), herein incorporated reference in its entirety. Such genetic elements could be used to enhance gene expression of new and existing traits for crop improvements.

[0091] In an aspect of the present invention, one or more of the nucleic molecules of the present invention are used to determine whether a plant (preferably soybean) has a mutation affecting the level (i.e., the concentration of mRNA in a sample, etc.) or pattern (i.e., the kinetics of expression, rate of decomposition, stability profile, etc.) of the expression encoded in part or whole by one or more of the nucleic acid molecule of the present invention (collectively, the “Expression Response” of a cell or tissue). As used herein, the Expression Response manifested by a cell or tissue is said to be “altered” if it differs from the Expression Response of cells or tissues of plants not exhibiting the phenotype. To determine whether a Expression Response is altered, the Expression Response manifested by the cell or tissue of the plant exhibiting the phenotype is compared with that of a similar cell or tissue sample of a plant not exhibiting the phenotype. As will be appreciated, it is not necessary to re-determine the Expression Response of the cell or tissue sample of plants not exhibiting the phenotype each time such a comparison is made; rather, the Expression Response of a particular plant may be compared with previously obtained values of normal plants. As used herein, the phenotype of the organism is any of one or more characteristics of an organism (e.g. disease resistance, pest tolerance, environmental tolerance, male sterility, yield, quality improvements, etc.). A change in genotype or phenotype may be transient or permanent. Also as used herein, a tissue sample is any sample that comprises more than one cell. In a preferred aspect, a tissue sample comprises cells that share a common characteristic (e.g. derived from leaf, root, or pollen etc).

[0092] In one sub-aspect, such an analysis is conducted by determining the presence and/or identity of polymorphism(s) by one or more of the nucleic acid molecules of the present invention and more specifically, one or more of the EST nucleic acid molecule or fragment thereof which are associated with phenotype, or a predisposition to phenotype.

[0093] Any of a variety of molecules can be used to identify such polymorphism(s). In one embodiment, one or more of the EST nucleic acid molecules (or a sub-fragment thereof) may be employed as a marker nucleic acid molecule to identify such polymorphism(s). Alternatively, such polymorphisms can be detected through the use of a marker nucleic acid molecule or a marker protein that is genetically linked to (i.e., a polynucleotide that co-segregates with) such polymorphism(s).

[0094] In an alternative embodiment, such polymorphisms can be detected through the use of a marker nucleic acid molecule that is physically linked to such polymorphism(s). For this purpose, marker nucleic acid molecules comprising a nucleotide sequence of a polynucleotide located within 1 mb of the polymorphism(s), and more preferably within 100 kb of the polymorphism(s), and most preferably within 10 kb of the polymorphism(s) can be employed.

[0095] The genomes of animals and plants naturally undergo spontaneous mutation in the course of their continuing evolution (Gusella, Ann. Rev. Biochem. 55:831-854 (1986)). A “polymorphism” is a variation or difference in the sequence of the gene or its flanking regions that arises in some of the members of a species. The variant sequence and the “original” sequence co-exist in the species' population. In some instances, such coexistence is in stable or quasi-stable equilibrium.

[0096] A polymorphism is thus said to be “allelic,” in that, due to the existence of the polymorphism, some members of a species may have the original sequence (i.e., the original “allele”) whereas other members may have the variant sequence (i.e., the variant “allele”). In the simplest case, only one variant sequence may exist, and the polymorphism is thus said to be di-allelic. In other cases, the species' population may contain multiple alleles, and the polymorphism is termed tri-allelic, etc. A single gene may have multiple different unrelated polymorphisms. For example, it may have a di-allelic polymorphism at one site, and a multi-allelic polymorphism at another site.

[0097] The variation that defines the polymorphism may range from a single nucleotide variation to the insertion or deletion of extended regions within a gene. In some cases, the DNA sequence variations are in regions of the genome that are characterized by short tandem repeats (STRs) that include tandem di- or tri-nucleotide repeated motifs of nucleotides. Polymorphisms characterized by such tandem repeats are referred to as “variable number tandem repeat” (“VNTR”) polymorphisms. VNTRs have been used in identity analysis (Weber, U.S. Pat. No. 5,075,217; Armour, et al., FEBS Lett. 307:113-115 (1992); Jones, et al., Eur. J. Haematol. 39:144-147 (1987); Horn, et al., PCT Application WO91/14003; Jeffreys, European Patent Application 370,719; Jeffreys, U.S. Pat. No. 5,699,082; Jeffreys. et al., Amer. J. Hum. Genet. 39:11-24 (1986); Jeffreys. et al., Nature 316:76-79 (1985); Gray, et al., Proc. R. Acad. Soc. Lond. 243:241-253 (1991); Moore, et al., Genomics 10:654-660 (1991); Jeffreys, et al., Anim. Genet. 18:1-15 (1987); Hillel, et al., Anim. Genet. 20:145-155 (1989); Hillel, et al., Genet. 124:783-789 (1990), all of which are herein incorporated by reference in their entirety).

[0098] The detection of polymorphic sites in a sample of DNA may be facilitated through the use of nucleic acid amplification methods. Such methods specifically increase the concentration of polynucleotides that span the polymorphic site, or include that site and sequences located either distal or proximal to it. Such amplified molecules can be readily detected by gel electrophoresis or other means.

[0099] The most preferred method of achieving such amplification employs the polymerase chain reaction (“PCR”) (Mullis, et al., Cold Spring Harbor Symp. Quant. Biol. 51:263-273 (1986); Erlich, et al., European Patent Appln. 50,424; European Patent Appln. 84,796, European Patent Application 258,017, European Patent Appln. 237,362; Mullis, European Patent Appln. 201,184; Mullis, et al., U.S. Pat. No. 4,683,202; Erlich., U.S. Pat. No. 4,582,788; and Saiki, et al., U.S. Pat. No. 4,683,194, all of which are herein incorporated by reference), using primer pairs that are capable of hybridizing to the proximal sequences that define a polymorphism in its double-stranded form.

[0100] In lieu of PCR, alternative methods, such as the “Ligase Chain Reaction” (“LCR”) may be used (Barany, Proc. Natl. Acad. Sci. (U.S.A.) 88:189-193 (1991), the entirety of which is herein incorporated by reference. LCR uses two pairs of oligonucleotide probes to exponentially amplify a specific target. The sequences of each pair of oligonucleotides is selected to permit the pair to hybridize to abutting sequences of the same strand of the target. Such hybridization forms a substrate for a template-dependent ligase. As with PCR, the resulting products thus serve as a template in subsequent cycles and an exponential amplification of the desired sequence is obtained.

[0101] LCR can be performed with oligonucleotides having the proximal and distal sequences of the same strand of a polymorphic site. In one embodiment, either oligonucleotide will be designed to include the actual polymorphic site of the polymorphism. In such an embodiment, the reaction conditions are selected such that the oligonucleotides can be ligated together only if the target molecule either contains or lacks the specific nucleotide that is complementary to the polymorphic site present on the oligonucleotide. Alternatively, the oligonucleotides may be selected such that they do not include the polymorphic site (see, Segev, PCT Application WO 90/01069, the entirety of which is herein incorporated by reference).

[0102] The “Oligonucleotide Ligation Assay” (“OLA”) may alternatively be employed (Landegren, et al., Science 241:1077-1080 (1988), the entirety of which is herein incorporated by reference). The OLA protocol uses two oligonucleotides which are designed to be capable of hybridizing to abutting sequences of a single strand of a target. OLA, like LCR, is particularly suited for the detection of point mutations. Unlike LCR, however, OLA results in “linear” rather than exponential amplification of the target sequence.

[0103] Nickerson, et al. have described a nucleic acid detection assay that combines attributes of PCR and OLA (Nickerson, et al., Proc. Natl. Acad. Sci. (U.S.A.) 87:8923-8927 (1990), the entirety of which is herein incorporated by reference). In this method, PCR is used to achieve the exponential amplification of target DNA, which is then detected using OLA. In addition to requiring multiple, and separate, processing steps, one problem associated with such combinations is that they inherit all of the problems associated with PCR and OLA.

[0104] Schemes based on ligation of two (or more) oligonucleotides in the presence of nucleic acid having the sequence of the resulting “di-oligonucleotide”, thereby amplifying the di-oligonucleotide, are also known (Wu, et al., Genomics 4:560 (1989), the entirety of which is herein incorporated by reference), and may be readily adapted to the purposes of the present invention.

[0105] Other known nucleic acid amplification procedures, such as allele-specific oligomers, branched DNA technology, transcription-based amplification systems, or isothermal amplification methods may also be used to amplify and analyze such polymorphisms (Malek, et al., U.S. Pat. No. 5,130,238; Davey, et al., European Patent Application 329,822; Schuster et al., U.S. Pat. No. 5,169,766; Miller, et al., PCT Application WO 89/06700; Kwoh, et al., Proc. Natl. Acad. Sci. (U.S.A.) 86:1173-1177 (1989); Gingeras, et al., PCT Application WO 88/10315; Walker, et al., Proc. Natl. Acad. Sci. (U.S.A.) 89:392-396 (1992), all of which are herein incorporated by reference in their entirety).

[0106] The identification of a polymorphism can be determined in a variety of ways. By correlating the presence or absence of it in an plant with the presence or absence of a phenotype, it is possible to predict the phenotype of that plant. If a polymorphism creates or destroys a restriction endonuclease cleavage site, or if it results in the loss or insertion of DNA (e.g., a VNTR polymorphism), it will alter the size or profile of the DNA fragments that are generated by digestion with that restriction endonuclease. As such, individuals that possess a variant sequence can be distinguished from those having the original sequence by restriction fragment analysis. Polymorphisms that can be identified in this manner are termed “restriction fragment length polymorphisms” (“RFLPs”). RFLPs have been widely used in human and plant genetic analyses (Glassberg, UK Patent Application 2135774; Skolnick, et al., Cytogen. Cell Genet. 32:58-67 (1982); Botstein, et al., Ann. J. Hum. Genet. 32:314-331 (1980); Fischer, et al. (PCT Application WO90/13668); Uhlen, PCT Application WO90/11369).

[0107] Polymorphisms can also be identified by Single Strand Conformation Polymorphism (SSCP) analysis. The SSCP technique is a method capable of identifying most sequence variations in a single strand of DNA, typically between 150 and 250 nucleotides in length (Elles, Methods in Molecular Medicine: Molecular Diagnosis of Genetic Diseases, Humana Press (1996), the entirety of which is herein incorporated by reference); Orita et al., Genomics 5: 874-879 (1989), the entirety of which is herein incorporated by reference). Under denaturing conditions a single strand of DNA will adopt a conformation that is uniquely dependent on its sequence conformation. This conformation usually will be different, even if only a single base is changed. Most conformations have been reported to alter the physical configuration or size sufficiently to be detectable by electrophoresis. A number of protocols have been described for SSCP including, but not limited to Lee et al., Anal. Biochem. 205: 289-293 (1992), the entirety of which is herein incorporated by reference; Suzuki et al., Anal. Biochem. 192: 82-84 (1991), the entirety of which is herein incorporated by reference; Lo et al., Nucleic Acids Research 20: 1005-1009 (1992), the entirety of which is herein incorporated by reference; Sarkar et al., Genomics 13: 441-443 (1992), the entirety of which is herein incorporated by reference). It is understood that one or more of the nucleic acids of the present invention, may be utilized as markers or probes to detect polymorphisms by SSCP analysis.

[0108] Polymorphisms may also be found using a DNA fingerprinting technique called amplified fragment length polymorphism (AFLP), which is based on the selective PCR amplification of restriction fragments from a total digest of genomic DNA to profile that DNA. Vos, et al., Nucleic Acids Res. 23:4407-4414 (1995), the entirety of which is herein incorporated by reference. This method allows for the specific co-amplification of high numbers of restriction fragments, which can be visualized by PCR without knowledge of the nucleic acid sequence.

[0109] AFLP employs basically three steps. Initially, a sample of genomic DNA is cut with restriction enzymes and oligonucleotide adapters are ligated to the restriction fragments of the DNA. The restriction fragments are then amplified using PCR by using the adapter and restriction sequence as target sites for primer annealing. The selective amplification is achieved by the use of primers that extend into the restriction fragments, amplifying only those fragments in which the primer extensions match the nucleotide flanking the restriction sites. These amplified fragments are then visualized on a denaturing polyacrylamide gel.

[0110] AFLP analysis has been performed on Salix (Beismann, et al., Mol. Ecol. 6:989-993 (1997), the entirety of which is herein incorporated by reference); Acinetobacter (Janssen, et al., Int. J. Syst. Bacteriol 47:1179-1187 (1997), the entirety of which is herein incorporated by reference), Aeromonas popoffi (Huys, et al., Int. J. Syst. Bacteriol. 47:1165-1171 (1997), the entirety of which is herein incorporated by reference), rice (McCouch, et al., Plant Mol. Biol. 35:89-99 (1997), the entirety of which is herein incorporated by reference); Nandi, et al., Mol. Gen. Genet. 255:1-8 (1997); Cho, et al., Genome 39:373-378 (1996), herein incorporated by reference), barley (Hordeum vulgare)(Simons, et al., Genomics 44:61-70 (1997), the entirety of which is herein incorporated by reference; Waugh, et al., Mol. Gen. Genet. 255:311-321 (1997), the entirety of which is herein incorporated by reference; Qi, et al., Mol. Gen. Genet. 254:330-336 (1997), the entirety of which is herein incorporated by reference; Becker, et al., Mol. Gen. Genet. 249:65-73 (1995), the entirety of which is herein incorporated by reference), potato (Van der Voort, et al., Mol. Gen. Genet. 255:438-447 (1997), the entirety of which is herein incorporated by reference; Meksem, et al., Mol. Gen. Genet. 249:74-81 (1995), the entirety of which is herein incorporated by reference), Phytophthora infestans (Van der Lee, et al., Fungal Genet. Biol. 21:278-291 (1997), the entirety of which is herein incorporated by reference), Bacillus anthracis (Keim, et al., J. Bacteriol. 179:818-824 (1997)), Astragalus cremnophylax (Travis, et al., Mol. Ecol. 5:735-745 (1996), the entirety of which is herein incorporated by reference), Arabidopsis (Cnops, et al., Mol. Gen. Genet. 253:3241 (1996), the entirety of which is herein incorporated by reference), Escherichia coli (Lin, et al., Nucleic Acids Res. 24:3649-3650 (1996), the entirety of which is herein incorporated by reference), Aeromonas (Huys, et al., Int. J. Syst. Bacteriol. 46:572-580 (1996), the entirety of which is herein incorporated by reference), nematode (Folkertsma, et al., Mol. Plant. Microbe Interact. 9:47-54 (1996), the entirety of which is herein incorporated by reference), tomato (Thomas, et al., Plant J. 8:785-794 (1995), the entirety of which is herein incorporated by reference), and human (Latorra, et al., PCR Methods Appl. 3:351-358 (1994)). AFLP analysis has also been used for fingerprinting mRNA (Money, et al., Nucleic Acids Res. 24:2616-2617 (1996), the entirety of which is herein incorporated by reference; Bachem, et al., Plant J. 9:745-753 (1996), the entirety of which is herein incorporated by reference). It is understood that one or more of the nucleic acids of the present invention, may be utilized as markers or probes to detect polymorphisms by AFLP analysis for fingerprinting mRNA.

[0111] Polymorphisms may also be found using random amplified polymorphic DNA (RAPD) (Williams et al., Nucl. Acids Res. 18: 6531-6535 (1990), the entirety of which is herein incorporated by reference) and cleaveable amplified polymorphic sequences (CAPS) (Lyamichev et al., Science 260: 778-783 (1993), the entirety of which is herein incorporated by reference). It is understood that one or more of the nucleic acids of the present invention, may be utilized as markers or probes to detect polymorphisms by RAPD or CAPS analysis.

[0112] Polymorphisms are useful, through linkage analysis, to define the genetic distances or physical distances between polymorphic traits. A physical map or ordered array of genomic DNA fragments in the desired region containing the gene may be used to characterize and isolate genes corresponding to desirable traits. For this purpose, yeast artificial chromosomes (YACs), bacterial artificial chromosomes (BACs), and cosmids are appropriate vectors for cloning large segments of DNA molecules. Although fewer clones are needed to make a contig for a specific genomic region by using YACs (Agyare et al., Genome Res. 7: 1-9 (1997), the entirety of which is herein incorporated by reference; James et al., Genomics 32: 425-430 (1996), the entirety of which is herein incorporated by reference), chimerism in the inserted DNA fragment can arise. Cosmids are convenient for handling smaller-size DNA molecules and may be used for transformation in developing transgenic plants. BACs also carry DNA fragments and are less prone to chimerism.

[0113] Through genetic mapping, a fine scale linkage map can be developed using DNA markers, and, then, a genomic DNA library of large-sized fragments can be screened with molecular markers linked to the desired trait. Molecular markers are advantageous for agronomic traits that are otherwise difficult to tag, such as resistance to pathogens, insects and nematodes, tolerance to abiotic stresses, quality parameters and quantitative traits. The essential requirements for marker-assisted selection in a plant breeding program are: (1) the marker(s) should co-segregate or be closely linked with the desired trait; (2) an efficient means of screening large populations for the molecular marker(s) should be available; and (3) the screening technique should have high reproducibility across laboratories, be economical to use and be user-friendly. Molecular marker studies using near-isogenic lines (NILs) (Martin et al., Proc. Natl. Acad. Sci. (U.S.A.) 88: 2336-2340 (1991), herein incorporate by reference; Young et al., Genetics 120: 579-585. (1988), the entirety of which is herein incorporated by reference, bulked segregant analysis (Michelmore et al., Proc. Natl. Acad. Sci. (U.S.A.) 88: 9828-9832 (1991), the entirety of which is herein incorporated by reference) or recombinant inbred lines (Mohan et al., Theor. Appl. Genet. 87: 782-788 (1994), the entirety of which is herein incorporated by reference) have been used to map genes in different plant species (Coe and Neuffer, In: Genetic maps: locus maps of complex genomes, ed. S. J. O'Brien, Cold Spring Harbor Laboratory, Cold Spring Harbor, N.Y., 157-189 (1993), the entirety of which is herein incorporated by reference). It is understood that one or more of the nucleic acid molecules of the present invention may be used as molecular markers.

[0114] In accordance with this aspect of the present invention, a sample nucleic acid is obtained from plants cells or tissues. Any source of nucleic acid may be used. Preferably, the nucleic acid is genomic DNA. The nucleic acid is subjected to restriction endonuclease digestion. For example, one or more EST nucleic acid molecule or fragment thereof can be used as a probe in accordance with the above-described polymorphic methods. The polymorphism obtained in this approach can then be cloned to identify the mutation at the coding region which alters the protein's structure or regulatory region of the gene which affects its expression level.

[0115] In one aspect of the present invention, an evaluation can be conducted to determine whether a particular mRNA molecule is present. One or more of the nucleic acid molecules of the present invention, preferably one or more of the EST nucleic acid molecules of the present invention are utilized to detect the presence or quantity of the mRNA species. Such molecules are then incubated with cell or tissue extracts of a plant under conditions sufficient to permit nucleic acid hybridization. The detection of double-stranded probe-mRNA hybrid molecules is indicative of the presence of the mRNA; the amount of such hybrid formed is proportional to the amount of mRNA. Thus, such probes may be used to ascertain the level and extent of the mRNA production in a plant's cells or tissues. Such nucleic acid hybridization may be conducted under quantitative conditions (thereby providing a numerical value of the amount of the mRNA present). Alternatively, the assay may be conducted as a qualitative assay that indicates either that the mRNA is present, or that its level exceeds a user set, predefined value.

[0116] A principle of in situ hybridization is that a labeled, single-stranded nucleic acid probe will hybridize to a complementary strand of cellular DNA or RNA and, under the appropriate conditions, these molecules will form a stable hybrid. When nucleic acid hybridization is combined with histological techniques, specific DNA or RNA sequences can be identified within a single cell. An advantage of in situ hybridization over more conventional techniques for the detection of nucleic acids is that it allows and investigator to determine the precise spatial population (Angerer et al., Dev. Biol. 101: 477-484 (1984), the entirety of which is herein incorporated by reference; Angerer et al., Dev. Biol. 112: 157-166 (1985), the entirety of which is herein incorporated by reference; Dixon et al., EMBO J. 10: 1317-1324 (1991), the entirety of which is herein incorporated by reference). In situ hybridization may be used to measure the steady-state level of RNA accumulation. It is a sensitive technique and RNA sequences present in as few as 5-10 copies per cell can be detected (Hardin et al., J. Mol. Biol. 202: 417-431. (1989), the entirety of which is herein incorporated by reference). A number of protocols have been devised for in situ hybridization, each with tissue preparation, hybridization, and washing conditions (Meyerowitz, Plant Mol. Biol. Rep. 5: 242-250 (1987), the entirety of which is herein incorporated by reference; Cox and Goldberg, In: Plant Molecular Biology: A Practical Approach (ed. C. H. Shaw), pp. 1-35. IRL Press, Oxford (1988), the entirety of which is herein incorporated by reference; Raikhel et al., In situ RNA hybridization in plant tissues. In Plant Molecular Biology Manual, vol. B9: 1-32. Kluwer Academic Publisher, Dordrecht, Belgium (1989), the entirety of which is herein incorporated by reference).

[0117] In situ hybridization also allows for the localization of proteins within a tissue or cell (Wilkinson, In Situ Hybridization, Oxford University Press, Oxford (1992), the entirety of which is herein incorporated by reference; Langdale, In Situ Hybridization 165-179 In: The Maize Handbook, eds. Freeling and Walbot, Springer-Verlag, New York (1994), the entirety of which is herein incorporated by reference). It is understood that one or more of the molecules of the present invention, preferably one or more of the EST nucleic acid molecules of the present invention or one or more of the antibodies of the present invention may be utilized to detect the level or pattern of a cytokinin pathway enzyme or fragment thereof by in situ hybridization.

[0118] Fluorescent in situ hybridization also enables the localization of a particular DNA sequence along a chromosome which is useful, among other uses, for gene mapping, following chromosomes in hybrid lines or detecting chromosomes with translocations, transversions or deletions. In situ hybridization has been used to identify chromosomes in several plant species (Griffor et al., Plant Mol. Biol. 17: 101-109 (1991), the entirety of which is herein incorporated by reference; Gustafson et al., Proc. Nat'l Acad. Sci. (U.S.A.). 87: 1899-1902 (1990), herein incorporated by reference; Mukai and Gill, Genome 34: 448-452. (1991); Schwarzacher and Heslop-Harrison, Genome 34: 317-323 (1991); Wang et al., Jpn. J. Genet. 66: 313-316 (1991), the entirety of which is herein incorporated by reference; Parra and Windle, Nature Genetics, 5: 17-21 (1993), the entirety of which is herein incorporated by reference). It is understood that the nucleic acid molecules of the present invention may be used as probes or markers to localize sequences along a chromosome

[0119] It is also understood that one or more of the molecules of the present invention, preferably one or more of the EST nucleic acid molecules of the present invention or one or more of the antibodies of the present invention may be utilized to detect the expression level or pattern of a protein or mRNA thereof by in situ hybridization.

[0120] Another method to localize the expression of a molecule is tissue printing. Tissue printing provides a way to screen, at the same time on the same membrane many tissue sections from different plants or different developmental stages. Tissue-printing procedures utilize films designed to immobilize proteins and nucleic acids. In essence, a freshly cut section of an organ is pressed gently onto nitrocellulose paper, nylon membrane or polyvinylidene difluoride membrane. Such membranes are commercially available (e.g. Millipore, Bedford, Mass.). The contents of the cut cell transfer onto the membrane, and the molecules are immobilized to the membrane. The immobilized molecules form a latent print that can be visualized with appropriate probes. When a plant tissue print is made on nitrocellulose paper, the cell walls leave a physical print that makes the anatomy visible without further treatment (Varner and Taylor, Plant Physiol. 91: 31-33 (1989), the entirety of which is herein incorporated by reference).

[0121] Tissue printing on substrate films is described by Daoust, Exp. Cell Res. 12: 203-211 (1957), the entirety of which is herein incorporated by reference, who detected amylase, protease, ribonuclease, and deoxyribonuclease in animal tissues using starch, gelatin, and agar films. These techniques can be applied to plant tissues (Yomo and Taylor, Planta 112:35-43 (1973); Harris and Chrispeels, Plant Physiol. 56: 292-299 (1975). Advances in membrane technology have increased the range of applications of Daoust's tissue-printing techniques allowing (Cassab and Varner, J. Cell. Biol. 105: 2581-2588 (1987), the entirety of which is herein incorporated by reference; the histochemical localization of various plant enzymes and deoxyribonuclease on nitrocellulose paper and nylon (Spruce et al., Phytochemistry, 26: 2901-2903 (1987), the entirety of which is herein incorporated by reference; Barres et al. Neuron 5: 527-544 (1990), the entirety of which is herein incorporated by reference; the entirety of which is herein incorporated by reference; Reid and Pont-Lezica, Tissue Printing: Tools for the Study of Anatomy, Histochemistry, and Gene Expression, Academic Press, New York, N.Y. (1992), the entirety of which is herein incorporated by reference; Reid et al. Plant Physiol. 93: 160-165 (1990), herein incorporate by reference; Ye et al. Plant J. 1: 175-183 (1991), the entirety of which is herein incorporated by reference).

[0122] It is understood that one or more of the molecules of the present invention, preferably one or more of the EST nucleic acid molecules of the present invention or one or more of the antibodies of the present invention may be utilized to detect the presence or quantity of a protein by tissue printing.

[0123] Further, it is also understood that any of the nucleic acid molecules of the present invention may be used as marker nucleic acids and or probes in connection with methods that require probes or marker nucleic acids. As used herein, a probe is an agent that is utilized to determine an attribute or feature (e.g. presence or absence, location, correlation, etc.) or a molecule, cell, tissue or plant. As used herein, a marker nucleic acid is a nucleic acid molecule that is utilized to determine an attribute or feature (e.g., presence or absence, location, correlation, etc.) or a molecule, cell, tissue or plant.

[0124] A microarray-based method for high-throughput monitoring of plant gene expression may be utilized to measure gene-specific hybridization targets. This ‘chip’-based approach involves using microarrays of nucleic acid molecules as gene-specific hybridization targets to quantitatively measure expression of the corresponding plant genes (Schena et al., Science 270: 467-470 (1995), the entirety of which is herein incorporated by reference; Shalon, Ph.D. Thesis. Stanford University (1996), the entirety of which is herein incorporated by reference). Every nucleotide in a large sequence can be queried at the same time. Hybridization can be used to efficiently analyze large amounts of nucleotide sequence.

[0125] Several microarray methods have been described. One method compares the sequences to be analyzed by hybridization to a set of oligonucleotides representing all possible subsequences (Bains and Smith, J. Theor. Biol. 135: 303 (1989), the entirety of which is herein incorporated by reference). A second method hybridizes the sample to an array of oligonucleotide probes. An array consisting of oligonucleotides complementary to subsequences of a target sequence can be used to determine the identity of a target sequence, measure its amount, and detect differences between the target and a reference sequence. Nucleic acid molecules microarrays may also be screened with protein molecules or fragments thereof to determine nucleic acid molecules that specifically bind protein molecules or fragments thereof.

[0126] The microarray approach may be used with polypeptide targets (U.S. Pat. No. 5,445,934; U.S. Pat. No. 5,143,854; U.S. Pat. No. 5,079,600; U.S. Pat. No. 4,923,901, all of which are herein incorporated by reference in their entirety). Essentially, polypeptides are synthesized on a substrate (microarray) and these polypeptides can be screened with either protein molecules or fragments thereof or nucleic acid molecules in order to screen for either protein molecules or fragments thereof or nucleic acid molecules that specifically bind the target polypeptides. Implementation of these techniques rely on recently developed combinatorial technologies to generate any ordered array of a large number of oligonucleotide probes (Fodor et al., Science 251:767-773 (1991), the entirety of which is herein incorporated by reference).

[0127] It is understood that one or more of the molecules of the present invention, preferably one or more of the nucleic acid molecules or protein molecules or fragments thereof of the present invention may be utilized in a microarray based method.

[0128] Site-directed mutagenesis may be utilized to modify nucleic acid sequences, particularly as it is a technique that allows one or more of the amino acids encoded by a nucleic acid molecule to be altered (e.g. a threonine to be replaced by a methionine). Three basic methods for site-directed mutagenesis are often employed. These are cassette mutagenesis (Wells et al., Gene 34:315-23 (1985), the entirety of which is herein incorporated by reference), primer extension (Gilliam et al., Gene 12:129-137 (1980), the entirety of which is herein incorporated by reference); Zoller and Smith, Methods Enzymol. 100:468-500 (1983), the entirety of which is herein incorporated by reference; and Dalbadie-McFarland et al., Proc. Natl. Acad. Sci. (U.S.A.) 79:6409-6413 (1982), the entirety of which is herein incorporated by reference) and methods based upon PCR (Scharf et al., Science 233:1076-1078 (1986), the entirety of which is herein incorporated by reference; Higuchi et al., Nucleic Acids Res. 16:7351-7367 (1988), the entirety of which is herein incorporated by reference). Site-directed mutagenesis approaches are also described in European Patent 0 385 962, the entirety of which is herein incorporated by reference, European Patent 0 359 472, the entirety of which is herein incorporated by reference, and PCT Patent Application WO 93/07278, the entirety of which is herein incorporated by reference.

[0129] Site-directed mutagenesis strategies have been applied to plants for both in vitro as well as in vivo site-directed mutagenesis (Lanz et al., J. Biol. Chem. 266:9971-6 (1991), the entirety of which is herein incorporated by reference; Kovgan and Zhdanov, Biotekhnologiya 5:148-154, No. 207160n, Chemical Abstracts 110:225 (1989), the entirety of which is herein incorporated by reference; Ge et al., Proc. Natl. Acad. Sci. (U.S.A.) 86:4037-4041 (1989), the entirety of which is herein incorporated by reference, Zhu et al., J. Biol. Chem. 271:18494-18498 (1996), Chu et al., Biochemistry 33:6150-6157 (1994), the entirety of which is herein incorporated by reference, Small et al., EMBO J. 11:1291-1296 (1992), the entirety of which is herein incorporated by reference, Cho et al., Mol. Biotechnol. 8:13-16 (1997), Kita et al., J. Biol. Chem. 271:26529-26535 (1996), the entirety of which is herein incorporated by reference, Jin et al., Mol. Microbiol. 7:555-562 (1993), the entirety of which is herein incorporated by reference, Hatfield and Vierstra, J. Biol. Chem. 267:14799-14803 (1992), the entirety of which is herein incorporated by reference, Zhao et al., Biochemistry 31:5093-5099 (1992), the entirety of which is herein incorporated by reference).

[0130] Any of the nucleic acid molecules of the present invention may either be modified by site-directed mutagenesis or used as, for example, nucleic acid molecules that are used to target other nucleic acid molecules for modification. It is understood that mutants with more than one altered nucleotide can be constructed using techniques that practitioners skilled in the art are familiar with such as isolating restriction fragments and ligating such fragments into an expression vector (see, for example, Sambrook et al., Molecular Cloning: A Laboratory Manual, Cold Spring Harbor Press (1989)).

[0131] Sequence-specific DNA-binding proteins play a role in the regulation of transcription. The isolation of recombinant cDNAs encoding these proteins facilitates the biochemical analysis of their structural and functional properties. Genes encoding such DNA-binding proteins have been isolated using classical genetics (Vollbrecht et al., Nature 350: 241-243 (1991), the entirety of which is herein incorporated by reference) and molecular biochemical approaches, including the screening of recombinant cDNA libraries with antibodies (Landschulz et al., Genes Dev. 2: 786-800 (1988), the entirety of which is herein incorporated by reference) or DNA probes (Bodner et al., Cell 55: 505-518 (1988), the entirety of which is herein incorporated by reference). In addition, an in situ screening procedure has been used and has facilitated the isolation of sequence-specific DNA-binding proteins from various plant species (Gilmartin et al., Plant Cell 4: 839-849 (1992), the entirety of which is herein incorporated by reference; Schindler et al., EMBO J. 11: 1261-1273 (1992) the entirety of which is herein incorporated by reference). An in situ screening protocol does not require the purification of the protein of interest (Vinson et al., Genes Dev. 2: 801-806 (1988), the entirety of which is herein incorporated by reference; Singh et al., Cell 52: 415-423 (1988), the entirety of which is herein incorporated by reference).

[0132] Steps may be employed to characterize DNA-protein interactions. The first is to identify promoter fragments that interact with DNA-binding proteins, to titrate binding activity, to determine the specificity of binding, and to determine whether a given DNA-binding activity can interact with related DNA sequences (Sambrook et al., Molecular Cloning: A Laboratory Manual, 2^{nd} edition. Cold Spring Harbor Laboratory Press, Cold Spring Harbor, N.Y. (1989). Electrophoretic mobility-shift assay is a widely used assay. The assay provides a simple, rapid, and sensitive method for detecting DNA-binding proteins based on the observation that the mobility of a DNA fragment through a nondenaturing, low-ionic strength polyacrylamide gel is retarded upon association with a DNA-binding protein (Fried and Crother, Nucleic Acids Res. 9: 6505-6525 (1981), the entirety of which is herein incorporated by reference). When one or more specific binding activities have been identified, the exact sequence of the DNA bound by the protein may be determined. Several procedures for characterizing protein/DNA-binding sites are used, including methylation and ethylation interference assays (Maxam and Gilbert, Methods Enzymol. 65: 499-560 (1980), the entirety of which is herein incorporated by reference; Wissman and Hillen, Methods Enzymol. 208: 365-379 (1991), the entirety of which is herein incorporated by reference) and footprinting techniques employing DNase I (Galas and Schmitz, Nucleic Acids Res. 5: 3157-3170 (1978), the entirety of which is herein incorporated by reference), 1,10-phenanthroline-copper ion methods (Sigman et al., Methods Enzymol. 208: 365-379 (1991), the entirety of which is herein incorporated by reference) or hydroxyl radical methods (Dixon et al., Methods Enzymol. 208: 380413 (1991), the entirety of which is herein incorporated by reference). It is understood that one or more of the nucleic acid molecules of the present invention, preferably one or more of the EST nucleic acid molecules of the present invention may be utilized to identify a protein or fragment thereof that specifically binds to a nucleic acid molecule of the present invention. It is also understood that one or more of the protein molecules or fragments thereof of the present invention may be utilized tp identify a nucleic acid molecule that specifically binds to it.

[0133] The two-hybrid system is based on the fact that many cellular functions are carried out by proteins that interact (physically) with one another. Two-hybrid systems have been used to probe the function of new proteins (Chien et al., Proc. Natl. Acad. Sci. (U.S.A.) 88: 9578-9582 (1991) the entirety of which is herein incorporated by reference; Durfee et al., Genes Dev. 7: 555-569 (1993) the entirety of which is herein incorporated by reference; Choi et al., Cell 78: 499-512 (1994), the entirety of which is herein incorporated by reference; Kranz et al., Genes Dev. 8: 313-327 (1994), the entirety of which is herein incorporated by reference).

[0134] Interaction mating techniques have facilitated a number of two-hybrid studies of protein-protein interaction. Interaction mating has been used to examine interactions between small sets of tens of proteins (Finley and Brent, Proc. Natl. Acad. Sci. (U.S.A.) 91: 12098-12984 (1994), the entirety of which is herein incorporated by reference), larger sets of hundreds of proteins, (Bendixen et al., Nucl. Acids Res. 22: 1778-1779 (1994), the entirety of which is herein incorporated by reference) and to comprehensively map proteins encoded by a small genome (Bartel et al., Nature Genetics 12: 72-77 (1996), the entirety of which is herein incorporated by reference). This technique utilizes proteins fused to the DNA-binding domain and proteins fused to the activation domain. They are expressed in two different haploid yeast strains of opposite mating type, and the strains are mated to determine if the two proteins interact. Mating occurs when haploid yeast strains come into contact and result in the fusion of the two haploids into a diploid yeast strain. An interaction can be determined by the activation of a two-hybrid reporter gene in the diploid strain. The primary advantage of this technique is that it reduces the number of yeast transformations needed to test individual interactions. It is understood that the protein-protein interactions of protein or fragments thereof of the present invention may be investigated using the two-hybrid system and that any of the nucleic acid molecules of the present invention that encode such proteins or fragments thereof may be used to transform yeast in the two-hybrid system.

[0135] Synechocystis 6803 is a photosynthetic Cyanobacterium capable of oxygenic photosynthesis as well as heterotrophic growth in the absence of light. The entire genome has been sequenced, and it is reported to have a circular genome size of 3.57 Mbp containing 3168 potential open reading frames. Open reading frames (ORFs) were identified based upon their homology to other reported ORFs and by using ORF identification computer programs. Sixteen hundred potential ORFs were assigned based on their homology to previously identified ORFs. Of these 1600 ORFs, 145 were identical to reported ORFs (Kaneko et al., DNA Research 3:109-36 (1996), herein incorporated by reference in its entirety).

[0136] Several prokaryote promoters have been used in Synechocystis to express heterologous genes including the tac, lac, and lambda phage promoters (Bryant (ed.), The Molecular Biology of Cyanobacteria, Kluwer Academic Publishers, (1994); Ferino and Chauvat, Gene 84:257-266 (1989), both of which are herein incorporated by reference in their entirety). Several bacterial origins of replication such as RSF1010 and ACYC are reported to replicate in Synechocystis (Mermet-Bouvier and Chauvat, Current Microbiology 28:145-148 (1994); Kuhlemeier et al., Mol. Gen. Genet. 184:249-254 (1981), both of which are herein incorporated by reference in their entirety).

[0137] Synechocystis has been used to study gene regulation by gene replacement through homologous recombination or by gene disruption using antibiotic resistance markers (Pakrasi et al., EMBO 7:325-332 (1988), herein incorporated by reference in its entirety). In such gene regulation studies, double reciprocal homologous regions of the host genome flanking the gene of interest recombine to stably integrate the gene of interest into the genome. The gene of interest can be expressed once that gene has been stably integrated into the genome. Biochemical analysis can be performed to study the effect of the replaced or deleted gene.

[0138] It is understood that the agents of the present invention may be employed in a Synechocystis system.

[0139] Exogenous genetic material may be transferred into a plant cell and the plant cell regenerated into a whole, fertile or sterile plant. Exogenous genetic material is any genetic material, whether naturally occurring or otherwise, from any source that is capable of being inserted into any organism. Such genetic material may be transferred into either monocotyledons and dicotyledons including but not limited to the crops, Zea mays and soybean (See specifically, Chistou, Particle Bombardment for Genetic Engineering of Plants, pp 63-69 (zea mays), pp 50-60 (soybean), Biotechnology Intelligence Unit. Academic Press, San Diego, Calif. (1996), the entirety of which is herein incorporated by reference and generally Chistou, Particle Bombardment for Genetic Engineering of Plants, Biotechnology Intelligence Unit. Academic Press, San Diego, Calif. (1996), the entirety of which is herein incorporated by reference).

[0140] Transfer of a nucleic acid that encodes for a protein can result in overexpression of that protein in a transformed cell or transgenic plant. One or more of the proteins or fragments thereof encoded by nucleic acid molecules of the present invention may be overexpressed in a transformed cell or transformed plant. Such overexpression may be the result of transient or stable transfer of the exogenous material.

[0141] Exogenous genetic material may be transferred into a plant cell by the use of a DNA vector or construct designed for such a purpose. Design of such a vector is generally within the skill of the art (See, Plant Molecular Biology: A Laboratory Manual eds. Clark, Springer, New York (1997), the entirety of which is herein incorporated by reference).

[0142] A construct or vector may include a plant promoter to express the protein or protein fragment of choice. A number of promoters which are active in plant cells have been described in the literature. These include the nopaline synthase (NOS) promoter (Ebert et al., Proc. Natl. Acad. Sci. (U.S.A.) 84:5745-5749 (1987), the entirety of which is herein incorporated by reference), the octopine synthase (OCS) promoter (which are carried on tumor-inducing plasmids of Agrobacterium tumefaciens), the caulimovirus promoters such as the cauliflower mosaic virus (CaMV) 19S promoter (Lawton et al., Plant Mol. Biol. 9:315-324 (1987), the entirety of which is herein incorporated by reference) and the CAMV 35S promoter (Odell et al., Nature 313:810-812 (1985), the entirety of which is herein incorporated by reference), the figwort mosaic virus 35S-promoter, the light-inducible promoter from the small subunit of ribulose-1,5-bisphosphate carboxylase (ssRUBISCO), the Adh promoter (Walker et al., Proc. Natl. Acad. Sci. (U.S.A.) 84:6624-6628 (1987), the entirety of which is herein incorporated by reference), the sucrose synthase promoter (Yang et al., Proc. Natl. Acad. Sci. (U.S.A.) 87:4144-4148 (1990), the entirety of which is herein incorporated by reference), the R gene complex promoter (Chandler et al., The Plant Cell 1:1175-1183 (1989), the entirety of which is herein incorporated by reference), and the chlorophyll a/b binding protein gene promoter, etc. These promoters have been used to create DNA constructs which have been expressed in plants; see, e.g., PCT publication WO 84/02913, herein incorporated by reference in its entirety.

[0143] Promoters which are known or are found to cause transcription of DNA in plant cells can be used in the present invention. Such promoters may be obtained from a variety of sources such as plants and plant viruses. It is preferred that the particular promoter selected should be capable of causing sufficient expression to result in the production of an effective amount of the cytokinin pathway enzyme to cause the desired phenotype. In addition to promoters which are known to cause transcription of DNA in plant cells, other promoters may be identified for use in the current invention by screening a plant cDNA library for genes which are selectively or preferably expressed in the target tissues or cells.

[0144] For the purpose of expression in source tissues of the plant, such as the leaf, seed, root or stem, it is preferred that the promoters utilized in the present invention have relatively high expression in these specific tissues. For this purpose, one may choose from a number of promoters for genes with tissue- or cell-specific or -enhanced expression. Examples of such promoters reported in the literature include the chloroplast glutamine synthetase GS2 promoter from pea (Edwards et al., Proc. Natl. Acad. Sci. (U.S.A.) 87:3459-3463 (1990), herein incorporated by reference in its entirety), the chloroplast fructose-1,6-biphosphatase (FBPase) promoter from wheat (Lloyd et al., Mol. Gen. Genet. 225:209-216 (1991), herein incorporated by reference in its entirety), the nuclear photosynthetic ST-LS1 promoter from potato (Stockhaus et al., EMBO J. 8:2445-2451 (1989), herein incorporated by reference in its entirety), the phenylalanine ammonia-lyase (PAL) promoter and the chalcone synthase (CHS) promoter from Arabidopsis thaliana. Also reported to be active in photosynthetically active tissues are the ribulose-1,5-bisphosphate carboxylase (RbcS) promoter from eastern larch (Larix laricina), the promoter for the cab gene, cab6, from pine (Yamamoto et al., Plant Cell Physiol. 35:773-778 (1994), herein incorporated by reference in its entirety), the promoter for the Cab-1 gene from wheat (Fejes et al., Plant Mol. Biol. 15:921-932 (1990), herein incorporated by reference in its entirety), the promoter for the CAB-1 gene from spinach (Lubberstedt et al., Plant Physiol. 104:997-1006 (1994), herein incorporated by reference in its entirety), the promoter for the cab1R gene from rice (Luan et al., Plant Cell. 4:971-981 (1992), the entirety of which is herein incorporated by reference), the pyruvate, orthophosphate dikinase (PPDK) promoter from Zea mays (Matsuoka et al., Proc. Natl. Acad. Sci. (U.S.A.) 90: 9586-9590 (1993), herein incorporated by reference in its entirety), the promoter for the tobacco Lhcb1*2 gene (Cerdan et al., Plant Mol. Biol. 33: 245-255. (1997), herein incorporated by reference in its entirety), the Arabidopsis thaliana SUC2 sucrose-H+ symporter promoter (Truernit et al., Planta. 196: 564-570 (1995), herein incorporated by reference in its entirety), and the promoter for the thylacoid membrane proteins from spinach (psaD, psaF, psaE, PC, FNR, atpC, atpD, cab, rbcS). Other promoters for the chlorophyl a/b-binding proteins may also be utilized in the present invention, such as the promoters for LhcB gene and PsbP gene from white mustard (Sinapis alba; Kretsch et al., Plant Mol. Biol. 28: 219-229 (1995), the entirety of which is herein incorporated by reference).

[0145] For the purpose of expression in sink tissues of the plant, such as the tuber of the potato plant, the fruit of tomato, or the seed of Zea mays, wheat, rice, and barley, it is preferred that the promoters utilized in the present invention have relatively high expression in these specific tissues. A number of promoters for genes with tuber-specific or -enhanced expression are known, including the class I patatin promoter (Bevan et al., EMBO J. 8: 1899-1906 (1986); Jefferson et al., Plant Mol. Biol. 14: 995-1006 (1990), both of which are herein incorporated by reference in its entirety), the promoter for the potato tuber ADPGPP genes, both the large and small subunits, the sucrose synthase promoter (Salanoubat and Belliard, Gene. 60: 47-56 (1987), Salanoubat and Belliard, Gene. 84: 181-185 (1989), both of which are incorporated by reference in their entirety), the promoter for the major tuber proteins including the 22 kd protein complexes and proteinase inhibitors (Hannapel, Plant Physiol. 101: 703-704 (1993), herein incorporated by reference in its entirety), the promoter for the granule bound starch synthase gene (GBSS) (Visser et al., Plant Mol. Biol. 17: 691-699 (1991), herein incorporated by reference in its entirety), and other class I and II patatins promoters (Koster-Topfer et al., Mol Gen Genet. 219: 390-396 (1989); Mignery et al., Gene. 62: 27-44 (1988), both of which are herein incorporated by reference in their entirety).

[0146] Other promoters can also be used to express a fructose 1,6-bisphosphate aldolase gene in specific tissues, such as seeds or fruits. The promoter for β-conglycinin (Chen et al., Dev. Genet. 10: 112-122 (1989), herein incorporated by reference in its entirety) or other seed-specific promoters such as the napin and phaseolin promoters, can be used. The zeins are a group of storage proteins found in Zea mays endosperm. Genomic clones for zein genes have been isolated (Pedersen et al., Cell 29: 1015-1026 (1982), herein incorporated by reference in its entirety), and the promoters from these clones, including the 15 kD, 16 kD, 19 kD, 22 kD, 27 kD, and gamma genes, could also be used. Other promoters known to function, for example, in Zea mays, include the promoters for the following genes: waxy, Brittle, Shrunken 2, Branching enzymes I and II, starch synthases, debranching enzymes, oleosins, glutelins, and sucrose synthases. A particularly preferred promoter for Zea mays endosperm expression is the promoter for the glutelin gene from rice, more particularly the Osgt-1 promoter (Zheng et al., Mol. Cell. Biol. 13: 5829-5842 (1993), herein incorporated by reference in its entirety). Examples of promoters suitable for expression in wheat include those promoters for the ADPglucose pyrophosphorylase (ADPGPP) subunits, the granule bound and other starch synthases, the branching and debranching enzymes, the embryogenesis-abundant proteins, the gliadins, and the glutenins. Examples of such promoters in rice include those promoters for the ADPGPP subunits, the granule bound and other starch synthases, the branching enzymes, the debranching enzymes, sucrose synthases, and the glutelins. A particularly preferred promoter is the promoter for rice glutelin, Osgt-1. Examples of such promoters for barley include those for the ADPGPP subunits, the granule bound and other starch synthases, the branching enzymes, the debranching enzymes, sucrose synthases, the hordeins, the embryo globulins, and the aleurone specific proteins.

[0147] Root specific promoters may also be used. An example of such a promoter is the promoter for the acid chitinase gene (Samac et al., Plant Mol. Biol. 25: 587-596 (1994), the entirety of which is herein incorporated by reference). Expression in root tissue could also be accomplished by utilizing the root specific subdomains of the CaMV35S promoter that have been identified (Lam et al., Proc. Natl. Acad. Sci. (U.S.A.) 86:7890-7894 (1989), herein incorporated by reference in its entirety). Other root cell specific promoters include those reported by Conkling et al. (Conkling et al., Plant Physiol. 93:1203-1211 (1990), the entirety of which is herein incorporated by reference).

[0148] Additional promoters that may be utilized are described, for example, in U.S. Pat. Nos. 5,378,619, 5,391,725, 5,428,147, 5,447,858, 5,608,144, 5,608,144, 5,614,399, 5,633,441, 5,633,435, and 4,633,436, all of which are herein incorporated in their entirety. In addition, a tissue specific enhancer may be used (Fromm et al., The Plant Cell 1:977-984 (1989), the entirety of which is herein incorporated by reference).

[0149] Constructs or vectors may also include, with the coding region of interest, a nucleic acid sequence that acts, in whole or in part, to terminate transcription of that region. For example, such sequences have been isolated including the Tr7 3′ sequence and the nos 3′ sequence (Ingelbrecht et al., The Plant Cell 1:671-680 (1989), the entirety of which is herein incorporated by reference; Bevan et al., Nucleic Acids Res. 11:369-385 (1983), the entirety of which is herein incorporated by reference), or the like.

[0150] A vector or construct may also include regulatory elements. Examples of such include the Adh intron 1 (Callis et al., Genes and Develop. 1:1183-1200 (1987), the entirety of which is herein incorporated by reference), the sucrose synthase intron (Vasil et al., Plant Physiol. 91:1575-1579 (1989), the entirety of which is herein incorporated by reference) and the TMV omega element (Gallie et al., The Plant Cell 1:301-311 (1989), the entirety of which is herein incorporated by reference). These and other regulatory elements may be included when appropriate.

[0151] A vector or construct may also include a selectable marker. Selectable markers may also be used to select for plants or plant cells that contain the exogenous genetic material. Examples of such include, but are not limited to, a neo gene (Potrykus et al., Mol. Gen. Genet. 199:183-188 (1985), the entirety of which is herein incorporated by reference) which codes for kanamycin resistance and can be selected for using kanamycin, G418, etc.; a bar gene which codes for bialaphos resistance; a mutant EPSP synthase gene (Hinchee et al., Bio/Technology 6:915-922 (1988), the entirety of which is herein incorporated by reference) which encodes glyphosate resistance; a nitrilase gene which confers resistance to bromoxynil (Stalker et al., J. Biol. Chem. 263:6310-6314 (1988), the entirety of which is herein incorporated by reference); a mutant acetolactate synthase gene (AMS) which confers imidazolinone or sulphonylurea resistance (European Patent Application 154,204 (Sep. 11, 1985), the entirety of which is herein incorporated by reference); and a methotrexate resistant DHFR gene (Thillet et al., J. Biol. Chem. 263:12500-12508 (1988), the entirety of which is herein incorporated by reference).

[0152] A vector or construct may also include a transit peptide. Incorporation of a suitable chloroplast transit peptide may also be employed (European Patent Application Publication Number 0218571, the entirety of which is herein incorporated by reference). Translational enhancers may also be incorporated as part of the vector DNA. DNA constructs could contain one or more 5′ non-translated leader sequences which may serve to enhance expression of the gene products from the resulting mRNA transcripts. Such sequences may be derived from the promoter selected to express the gene or can be specifically modified to increase translation of the mRNA. Such regions may also be obtained from viral RNAs, from suitable eukaryotic genes, or from a synthetic gene sequence. For a review of optimizing expression of transgenes, see Koziel et al., Plant Mol. Biol. 32:393-405 (1996), the entirety of which is herein incorporated by reference.

[0153] A vector or construct may also include a screenable marker. Screenable markers may be used to monitor expression. Exemplary screenable markers include a β-glucuronidase or uidA gene (GUS) which encodes an enzyme for which various chromogenic substrates are known (Jefferson, Plant Mol. Biol. Rep. 5: 387405 (1987), the entirety of which is herein incorporated by reference; Jefferson et al., EMBO J. 6: 3901-3907 (1987), the entirety of which is herein incorporated by reference); an R-locus gene, which encodes a product that regulates the production of anthocyanin pigments (red color) in plant tissues ((Dellaporta et al., Stadler Symposium 11:263-282 (1988), the entirety of which is herein incorporated by reference); a β-lactamase gene (Sutcliffe et al., Proc. Natl. Acad. Sci. (U.S.A.) 75: 3737-3741 (1978), the entirety of which is herein incorporated by reference), a gene which encodes an enzyme for which various chromogenic substrates are known (e.g., PADAC, a chromogenic cephalosporin); a luciferase gene (Ow et al., Science 234: 856-859 (1986), the entirety of which is herein incorporated by reference) a xylE gene (Zukowsky et al., Proc. Natl. Acad. Sci. (U.S.A.) 80:1101-1105 (1983), the entirety of which is herein incorporated by reference) which encodes a catechol diozygenase that can convert chromogenic catechols; an α-amylase gene (Ikatu et al., Bio/Technol. 8:241-242 (1990), the entirety of which is herein incorporated by reference); a tyrosinase gene (Katz et al., J. Gen. Microbiol. 129:2703-2714 (1983), the entirety of which is herein incorporated by reference) which encodes an enzyme capable of oxidizing tyrosine to DOPA and dopaquinone which in turn condenses to melanin; an α-galactosidase, which will turn a chromogenic α-galactose substrate.

[0154] Included within the terms “selectable or screenable marker genes” are also genes which encode a scriptable marker whose secretion can be detected as a means of identifying or selecting for transformed cells. Examples include markers which encode a secretable antigen that can be identified by antibody interaction, or even secretable enzymes which can be detected catalytically. Secretable proteins fall into a number of classes, including small, diffusible proteins detectable, e.g., by ELISA, small active enzymes detectable in extracellular solution (e.g., α-amylase, β-lactamase, phosphinothricin transferase), or proteins which are inserted or trapped in the cell wall (such as proteins which include a leader sequence such as that found in the expression unit of extension or tobacco PR-S). Other possible selectable and/or screenable marker genes will be apparent to those of skill in the art.

[0155] Methods and compositions for transforming a bacteria and other microorganisms are known in the art (see for example Sambrook et al., Molecular Cloning: A Laboratory Manual, Second Edition, Cold Spring Harbor Laboratory Press, Cold Spring Harbor, N.Y., (1989), the entirety of which is herein incorporated by reference).

[0156] There are many methods for introducing transforming nucleic acid molecules into plant cells. Suitable methods are believed to include virtually any method by which nucleic acid molecules may be introduced into a cell, such as by Agrobacterium infection or direct delivery of nucleic acid molecules such as, for example, by PEG-mediated transformation, by electroporation or by acceleration of DNA coated particles, etc. (Pottykus, Ann. Rev. Plant Physiol. Plant Mol. Biol. 42:205-225 (1991), the entirety of which is herein incorporated by reference; Vasil, Plant Mol. Biol. 25: 925-937 (1994), the entirety of which is herein incorporated by reference. For example, electroporation has been used to transform Zea mays protoplasts (Fromm et al., Nature 312:791-793 (1986), the entirety of which is herein incorporated by reference).

[0157] Other vector systems suitable for introducing transforming DNA into a host plant cell includes but is not limited to binary artificial chromosome (BIBAC) vectors (Hamilton et al., Gene 200:107-116, (1997), the entirety of which is herein incorporated by reference, and transfection with RNA viral vectors (Della-Cioppa et al., Ann. N.Y. Acad. Sci. (1996), 792 (Engineering Plants for Commercial Products and Applications), 57-61, the entirety of which is herein incorporated by reference.

[0158] Technology for introduction of DNA into cells is well known to those of skill in the art. Four general methods for delivering a gene into cells have been described: (1) chemical methods (Graham and van der Eb, Virology, 54:536-539 (1973), the entirety of which is herein incorporated by reference); (2) physical methods such as microinjection (Capecchi, Cell 22:479-488 (1980), electroporation (Wong and Neumann, Biochem. Biophys. Res. Commun., 107:584-587 (1982); Fromm et al., Proc. Natl. Acad. Sci. USA, 82:5824-5828 (1985); U.S. Pat. No. 5,384,253; and the gene gun (Johnston and Tang, Methods Cell Biol. 43:353-365 (1994), all of which the entirety is herein incorporated by reference; (3) viral vectors (Clapp, Clin. Perinatol., 20:155-168 (1993); Lu et al., J. Exp. Med., 178:2089-2096 (1993); Eglitis and Anderson, Biotechniques, 6:608-614 (1988), all of which the entirety is herein incorporated by reference); and (4) receptor-mediated mechanisms (Curiel et al., Hum. Gen. Ther., 3:147-154 (1992); Wagner et al., Proc. Natl. Acad. Sci. USA, 89:6099-6103 (1992), all of which the entirety is herein incorporated by reference).

[0159] Acceleration methods that may be used include, for example, microprojectile bombardment and the like. One example of a method for delivering transforming nucleic acid molecules to plant cells is microprojectile bombardment. This method has been reviewed by Yang and Christou, eds., Particle Bombardment Technology for Gene Transfer, Oxford Press, Oxford, England (1994), the entirety of which is herein incorporated by reference). Non-biological particles (microprojectiles) that may be coated with nucleic acids and delivered into cells by a propelling force. Exemplary particles include those comprised of tungsten, gold, platinum, and the like.

[0160] A particular advantage of microprojectile bombardment, in addition to it being an effective means of reproducibly, and stably transforming monocotyledons, is that neither the isolation of protoplasts (Cristou et al., Plant Physiol. 87:671-674 (1988), the entirety of which is herein incorporated by reference) nor the susceptibility of Agrobacterium infection is required. An illustrative embodiment of a method for delivering DNA into maize cells by acceleration is a biolistics γ-particle delivery system, which can be used to propel particles coated with DNA through a screen, such as a stainless steel or Nytex screen, onto a filter surface covered with corn cells cultured in suspension. Gordon-Kamm et al., describes the basic procedure for coating tungsten particles with DNA (Gordon-Kamm et al., Plant Cell 2: 603-618 (1990), the entirety of which is herein incorporated by reference). The screen disperses the tungsten nucleic acid particles so that they are not delivered to the recipient cells in large aggregates. A particle delivery system suitable for use with the present invention is the helium acceleration PDS-1000/He gun which is available from Bio-Rad Laboratories (Bio-Rad, Hercules, Calif.)(Sanford et al., Technique 3:3-16 (1991), the entirety of which is herein incorporated by reference).

[0161] For the bombardment, cells in suspension may be concentrated on filters. Filters containing the cells to be bombarded are positioned at an appropriate distance below the microprojectile stopping plate. If desired, one or more screens are also positioned between the gun and the cells to be bombarded.

[0162] Alternatively, immature embryos or other target cells may be arranged on solid culture medium. The cells to be bombarded are positioned at an appropriate distance below the macroprojectile stopping plate. If desired, one or more screens are also positioned between the acceleration device and the cells to be bombarded. Through the use of techniques set forth herein one may obtain up to 1000 or more foci of cells transiently expressing a marker gene. The number of cells in a focus which express the exogenous gene product 48 hours post-bombardment often range from one to ten and average one to three.

[0163] In bombardment transformation, one may optimize the prebombardment culturing conditions and the bombardment parameters to yield the maximum numbers of stable transformants. Both the physical and biological parameters for bombardment are important in this technology. Physical factors are those that involve manipulating the DNA/microprojectile precipitate or those that affect the flight and velocity of either the macro- or microprojectiles. Biological factors include all steps involved in manipulation of cells before and immediately after bombardment, the osmotic adjustment of target cells to help alleviate the trauma associated with bombardment, and also the nature of the transforming DNA, such as linearized DNA or intact supercoiled plasmids. It is believed that pre-bombardment manipulations are especially important for successful transformation of immature embryos.

[0164] In another alternative embodiment, plastids can be stably transformed. Methods disclosed for plastid transformation in higher plants include the particle gun delivery of DNA containing a selectable marker and targeting of the DNA to the plastid genome through homologous recombination (Svab et al., Proc. Natl. Acad. Sci. (U.S.A.) 87:8526-8530 (1990); Svab and Maliga, Proc. Natl. Acad. Sci. (U.S.A.) 90:913-917 (1993); Staub and Maliga, EMBO J. 12:601-606 (1993); U.S. Pat. Nos. 5,451,513 and 5,545,818, all of which are herein incorporated by reference in their entirety).

[0165] Accordingly, it is contemplated that one may wish to adjust various aspects of the bombardment parameters in small scale studies to fully optimize the conditions. One may particularly wish to adjust physical parameters such as gap distance, flight distance, tissue distance, and helium pressure. One may also minimize the trauma reduction factors by modifying conditions which influence the physiological state of the recipient cells and which may therefore influence transformation and integration efficiencies. For example, the osmotic state, tissue hydration and the subculture stage or cell cycle of the recipient cells may be adjusted for optimum transformation. The execution of other routine adjustments will be known to those of skill in the art in light of the present disclosure.

[0166] Agrobacterium-mediated transfer is a widely applicable system for introducing genes into plant cells because the DNA can be introduced into whole plant tissues, thereby bypassing the need for regeneration of an intact plant from a protoplast. The use of Agrobacterium-mediated plant integrating vectors to introduce DNA into plant cells is well known in the art. See, for example the methods described (Fraley et al., Biotechnology 3:629-635 (1985); Rogers et al., Meth. In Enzymol, 153:253-277 (1987), both of which are herein incorporated by reference in their entirety. Further, the integration of the Ti-DNA is a relatively precise process resulting in few rearrangements. The region of DNA to be transferred is defined by the border sequences, and intervening DNA is usually inserted into the plant genome as described (Spielmann et al., Mol. Gen. Genet., 205:34 (1986), the entirety of which is herein incorporated by reference).

[0167] Modern Agrobacterium transformation vectors are capable of replication in E. coli as well as Agrobacterium, allowing for convenient manipulations as described (Klee et al., In: Plant DNA Infectious Agents, T. Hohn and J. Schell, eds., Springer-Verlag, New York, pp. 179-203 (1985), the entirety of which is herein incorporated by reference. Moreover, recent technological advances in vectors for Agrobacterium-mediated gene transfer have improved the arrangement of genes and restriction sites in the vectors to facilitate construction of vectors capable of expressing various polypeptide coding genes. The vectors described have convenient multi-linker regions flanked by a promoter and a polyadenylation site for direct expression of inserted polypeptide coding genes and are suitable for present purposes (Rogers et al., Meth. In Enzymol., 153:253-277 (1987), the entirety of which is herein incorporated by reference). In addition, Agrobacterium containing both armed and disarmed Ti genes can be used for the transformations. In those plant strains where Agrobacterium-mediated transformation is efficient, it is the method of choice because of the facile and defined nature of the gene transfer.

[0168] A transgenic plant formed using Agrobacterium transformation methods typically contains a single gene on one chromosome. Such transgenic plants can be referred to as being heterozygous for the added gene. More preferred is a transgenic plant that is homozygous for the added structural gene; i.e., a transgenic plant that contains two added genes, one gene at the same locus on each chromosome of a chromosome pair. A homozygous transgenic plant can be obtained by sexually mating (selfing) an independent segregant transgenic plant that contains a single added gene, germinating some of the seed produced and analyzing the resulting plants produced for the gene of interest.

[0169] It is also to be understood that two different transgenic plants can also be mated to produce offspring that contain two independently segregating added, exogenous genes. Selfing of appropriate progeny can produce plants that are homozygous for both added, exogenous genes that encode a polypeptide of interest. Back-crossing to a parental plant and out-crossing with a non-transgenic plant are also contemplated, as is vegetative propagation.

[0170] Transformation of plant protoplasts can be achieved using methods based on calcium phosphate precipitation, polyethylene glycol treatment, electroporation, and combinations of these treatments. See for example (Potrykus et al., Mol. Gen. Genet., 205:193-200 (1986); Lorz et al., Mol. Gen. Genet., 199:178, (1985); Fromm et al., Nature, 319:791 (1986); Uchimiya et al., Mol. Gen. Genet. 204:204, (1986); Callis et al., Genes and Development, 1183 (1987); Marcotte et al., Nature, 335:454, (1988), all of which the entirety is herein incorporated by reference).

[0171] Application of these systems to different plant strains depends upon the ability to regenerate that particular plant strain from protoplasts. Illustrative methods for the regeneration of cereals from protoplasts are described (Fujimura et al., Plant Tissue Culture Letters, 2:74 (1985); Toriyama et al., Theor Appl. Genet. 205:34. (1986); Yamada et al., Plant Cell Rep., 4:85, (1986); Abdullah et al., Biotechnology, 4:1087, (1986), all of which the entirety is herein incorporated by reference).

[0172] To transform plant strains that cannot be successfully regenerated from protoplasts, other ways to introduce DNA into intact cells or tissues can be utilized. For example, regeneration of cereals from immature embryos or explants can be effected as described (Vasil, Biotechnology, 6:397 (1988), the entirety of which is herein incorporated by reference). In addition, “particle gun” or high-velocity microprojectile technology can be utilized (Vasil et al., Bio/Technology 10:667, (1992), the entirety of which is herein incorporated by reference).

[0173] Using the latter technology, DNA is carried through the cell wall and into the cytoplasm on the surface of small metal particles as described (Klein et al., Nature, 328:70, (1987); Klein et al., Proc. Natl. Acad. Sci. USA, 85:8502-8505, (1988); McCabe et al., Biotechnology, 6:923, (1988), all of which the entirety is herein incorporated by reference). The metal particles penetrate through several layers of cells and thus allow the transformation of cells within tissue explants.

[0174] Other methods of cell transformation can also be used and include but are not limited to introduction of DNA into plants by direct DNA transfer into pollen (Zhou et al., Methods in Enzymology, 101:433, (1983); Hess et al., Intern Rev. Cytol., 107:367, (1987); Luo et al., Plant Mol. Biol. Reporter, 6:165, (1988), all of which the entirety is herein incorporated by reference), by direct injection of DNA into reproductive organs of a plant (Pena et al., Nature, 325:274, (1987), the entirety of which is herein incorporated by reference), or by direct injection of DNA into the cells of immature embryos followed by the rehydration of dessicated embryos (Neuhaus et al., Theor. Appl. Genet., 75:30, (1987), the entirety of which is herein incorporated by reference).

[0175] The regeneration, development, and cultivation of plants from single plant protoplast transformants or from various transformed explants is well known in the art (Weissbach and Weissbach, In: Methods for Plant Molecular Biology, (Eds.), Academic Press, Inc. San Diego, Calif., (1988), the entirety of which is herein incorporated by reference). This regeneration and growth process typically includes the steps of selection of transformed cells, culturing those individualized cells through the usual stages of embryonic development through the rooted plantlet stage. Transgenic embryos and seeds are similarly regenerated. The resulting transgenic rooted shoots are thereafter planted in an appropriate plant growth medium such as soil.

[0176] The development or regeneration of plants containing the foreign, exogenous gene that encodes a protein of interest is well known in the art. Preferably, the regenerated plants are self-pollinated to provide homozygous transgenic plants, as discussed before. Otherwise, pollen obtained from the regenerated plants is crossed to seed-grown plants of agronomically important lines. Conversely, pollen from plants of these important lines is used to pollinate regenerated plants. A transgenic plant of the present invention containing a desired polypeptide is cultivated using methods well known to one skilled in the art.

[0177] There are a variety of methods for the regeneration of plants from plant tissue. The particular method of regeneration will depend on the starting plant tissue and the particular plant species to be regenerated.

[0178] Methods for transforming dicots, primarily by use of Agrobacterium tumefaciens, and obtaining transgenic plants have been published for cotton (U.S. Pat. No. 5,004,863, U.S. Pat. No. 5,159,135, U.S. Pat. No. 5,518,908, all of which the entirety is herein incorporated by reference); soybean (U.S. Pat. No. 5,569,834, U.S. Pat. No. 5,416,011, McCabe et al., Biotechnology 6:923, (1988), Christou et al., Plant Physiol., 87:671-674 (1988), all of which the entirety is herein incorporated by reference); Brassica (U.S. Pat. No. 5,463,174, the entirety of which is herein incorporated by reference); peanut (Cheng et al., Plant Cell Rep. 15: 653-657 (1996), McKently et al., Plant Cell Rep. 14:699-703 (1995), all of which the entirety is herein incorporated by reference); papaya (Yang et al., (1996), the entirety of which is herein incorporated by reference); pea (Grant et al., Plant Cell Rep. 15:254-258, (1995), the entirety of which is herein incorporated by reference).

[0179] Transformation of monocotyledons using electroporation, particle bombardment, and Agrobacterium have also been reported. Transformation and plant regeneration have been achieved in asparagus (Bytebier et al., Proc. Natl. Acad. Sci. USA 84:5345, (1987), the entirety of which is herein incorporated by reference); barley (Wan and Lemaux, Plant Physiol 104:37, (1994), the entirety of which is herein incorporated by reference); maize (Rhodes et al., Science 240: 204, (1988), Gordon-Kamm et al., Plant Cell, 2:603, (1990), Fromm et al., Bio/Technology 8:833, (1990), Koziel et al., Bio/Technology 11:194, (1993), Armstrong et al., Crop Science 35:550-557, (1995), all of which the entirety is herein incorporated by reference); oat (Somers et al., Bio/Technology, 10:1589, (1992), the entirety of which is herein incorporated by reference); orchardgrass (Horn et al., Plant Cell Rep. 7:469, (1988), the entirety of which is herein incorporated by reference); rice (Toriyama et al., Theor Appl. Genet. 205:34, (1986); Park et al., Plant Mol. Biol., 32: 1135-1148, (1996); Abedinia et al., Aust. J. Plant Physiol. 24:133-141, (1997); Zhang and Wu, Theor. Appl. Genet. 76:835, (1988); Zhang et al. Plant Cell Rep. 7:379, (1988); Battraw and Hall, Plant Sci. 86:191-202, (1992); Christou et al., Bio/Technology 9:957, (1991), all of which the entirety is herein incorporated by reference); sugarcane (Bower and Birch, Plant J. 2:409, (1992), the entirety of which is herein incorporated by reference); tall fescue (Wang et al., Bio/Technology 10:691, (1992), the entirety of which is herein incorporated by reference), and wheat (Vasil et al., Bio/Technology 10:667, (1992), the entirety of which is herein incorporated by reference; U.S. Pat. No. 5,631,152, the entirety of which is herein incorporated by reference.

[0180] Assays for gene expression based on the transient expression of cloned nucleic acid constructs have been developed by introducing the nucleic acid molecules into plant cells by polyethylene glycol treatment, electroporation, or particle bombardment (Marcotte, et al., Nature, 335: 454-457 (1988), the entirety of which is herein incorporated by reference; Marcotte, et al., Plant Cell, 1: 523-532 (1989), the entirety of which is herein incorporated by reference; McCarty, et al., Cell 66: 895-905 (1991), the entirety of which is herein incorporated by reference; Hattori, et al., Genes Dev. 6: 609-618 (1992), the entirety of which is herein incorporated by reference; Goff, et al., EMBO J. 9: 2517-2522 (1990), the entirety of which is herein incorporated by reference). Transient expression systems may be used to functionally dissect gene constructs (See generally, Mailga et al., Methods in Plant Molecular Biology, Cold Spring Harbor Press (1995)).

[0181] Any of the nucleic acid molecules of the present invention may be introduced into a plant cell in a permanent or transient manner in combination with other genetic elements such as vectors, promoters enhancers etc. Further any of the nucleic acid molecules of the present invention may be introduced into a plant cell in a manner that allows for over expression of the protein or fragment thereof encoded by the nucleic acid molecule.

[0182] Cosuppression is the reduction in expression levels, usually at the level of RNA, of a particular endogenous gene or gene family by the expression of a homologous sense construct that is capable of transcribing mRNA of the same strandedness as the transcript of the endogenous gene (Napoli et al., Plant Cell 2: 279-289 (1990), the entirety of which is herein incorporated by reference; van der Krol et al., Plant Cell 2: 291-299 (1990), the entirety of which is herein incorporated by reference). Cosuppression may result from stable transformation with a single copy nucleic acid molecule that is homologous to a nucleic acid sequence found with the cell (Prolls and Meyer, Plant J. 2:465-475 (1992), the entirety of which is herein incorporated by reference) or with multiple copies of a nucleic acid molecule that is homologous to a nucleic acid sequence found with the cell (Mittlesten et al., Mol. Gen. Genet. 244: 325-330 (1994), the entirety of which is herein incorporated by reference). Genes, even though different, linked to homologous promoters may result in the cosuppression of the linked genes (Vaucheret, C. R. Acad. Sci. III 316: 1471-1483 (1993), the entirety of which is herein incorporated by reference).

[0183] This technique has, for example been applied to generate white flowers from red petunia and tomatoes that do not ripen on the vine. Up to 50% of petunia transformants that contained a sense copy of the chalcone synthase (CHS) gene produced white flowers or floral sectors; this was as a result of the post-transcriptional loss of mRNA encoding CHS (Flavell, Proc. Natl. Acad. Sci. (U.S.A.) 91:3490-3496 (1994)), the entirety of which is herein incorporated by reference). Cosuppression may require the coordinate transcription of the transgene and the endogenous gene, and can be reset by a developmental control mechanism (Jorgensen, Trends Biotechnol, 8:340344 (1990), the entirety of which is herein incorporated by reference; Meins and Kunz, In: Gene Inactivation and Homologous Recombination in Plants (Paszkowski, J., ed.), pp. 335-348. Kluwer Academic, Netherlands (1994), the entirety of which is herein incorporated by reference).

[0184] It is understood that one or more of the nucleic acids of the present invention comprising SEQ ID NO: 1 or complement thereof through SEQ ID NO:5521 or complement thereof, may be introduced into a plant cell and transcribed using an appropriate promoter with such transcription resulting in the co-suppression of an endogenous protein.

[0185] Antisense approaches are a way of preventing or reducing gene function by targeting the genetic material (Mol et al., FEBS Lett. 268: 427-430 (1990), the entirety of which is herein incorporated by reference). The objective of the antisense approach is to use a sequence complementary to the target gene to block its expression and create a mutant cell line or organism in which the level of a single chosen protein is selectively reduced or abolished. Antisense techniques have several advantages over other ‘reverse genetic’ approaches. The site of inactivation and its developmental effect can be manipulated by the choice of promoter for antisense genes or by the timing of external application or microinjection. Antisense can manipulate its specificity by selecting either unique regions of the target gene or regions where it shares homology to other related genes (Hiatt et al., In Genetic Engineering, Setlow (ed.), Vol. 11, New York: Plenum 49-63 (1989), the entirety of which is herein incorporated by reference).

[0186] The principle of regulation by antisense RNA is that RNA that is complementary to the target mRNA is introduced into cells, resulting in specific RNA:RNA duplexes being formed by base pairing between the antisense substrate and the target mRNA (Green et al., Annu. Rev. Biochem. 55: 569-597 (1986), the entirety of which is herein incorporated by reference). Under one embodiment, the process involves the introduction and expression of an antisense gene sequence. Such a sequence is one in which part or all of the normal gene sequences are placed under a promoter in inverted orientation so that the ‘wrong’ or complementary strand is transcribed into a noncoding antisense RNA that hybridizes with the target mRNA and interferes with its expression (Takayama and Inouye, Crit. Rev. Biochem. Mol. Biol. 25: 155-184 (1990), the entirety of which is herein incorporated by reference). An antisense vector is constructed by standard procedures and introduced into cells by transformation, transfection, electroporation, microinjection, or by infection, etc. The type of transformation and choice of vector will determine whether expression is transient or stable. The promoter used for the antisense gene may influence the level, timing, tissue, specificity, or inducibility of the antisense inhibition.

[0187] It is understood that protein synthesis activity in a plant cell may be reduced or depressed by growing a transformed plant cell containing a nucleic acid molecule whose non-transcribed strand encodes a protein synthesis enzyme or fragment thereof.

[0188] Antibodies have been expressed in plants (Hiatt et al., Nature 342:76-78 (1989), the entirety of which is herein incorporated by reference; Conrad and Fielder, Plant Mol. Biol. 26: 1023-1030 (1994), the entirety of which is herein incorporated by reference). Cytoplamic expression of a scFv (single-chain Fv antibodies) has been reported to delay infection by artichoke mottled crinkle virus. Transgenic plants that express antibodies directed against endogenous proteins may exhibit a physiological effect (Philips et al., EMBO J. 16: 44894496 (1997), the entirety of which is herein incorporated by reference; Marion-Poll, Trends in Plant Science 2: 447-448 (1997), the entirety of which is herein incorporated by reference). For example, expressed anti-abscisic antibodies reportedly result in a general perturbation of seed development (Philips et al., EMBO J. 16: 4489-4496 (1997)).

[0189] Antibodies that are catalytic may also be expressed in plants (abzymes). The principle behind abzymes is that since antibodies may be raised against many molecules, this recognition ability can be directed toward generating antibodies that bind transition states to force a chemical reaction forward (Persidas, Nature Biotechnology 15:1313-1315 (1997), the entirety of which is herein incorporated by reference; Baca et al., Ann. Rev. Biophys. Biomol. Struct. 26:461-493 (1997), the entirety of which is herein incorporated by reference). The catalytic abilities of abzymes may be enhanced by site directed mutagenesis. Examples of abzymes are, for example, set forth in U.S. Pat. No. 5,658,753; U.S. Pat. No. 5,632,990; U.S. Pat. No. 5,631,137; U.S. Pat. No. 5,602,015; U.S. Pat. No. 5,559,538; U.S. Pat. No. 5,576,174; U.S. Pat. No. 5,500,358; U.S. Pat. No. 5,318,897; U.S. Pat. No. 5,298,409; U.S. Pat. No. 5,258,289 and U.S. Pat. No. 5,194,585, all of which are herein incorporated in their entirety.

[0190] It is understood that any of the antibodies of the present invention may be expressed in plants and that such expression can result in a physiological effect. It is also understood that any of the expressed antibodies may be catalytic.

[0191] In addition to the above discussed procedures, practitioners are familiar with the standard resource materials which describe specific conditions and procedures for the construction, manipulation and isolation of macromolecules (e.g., DNA molecules, plasmids, etc.), generation of recombinant organisms and the screening and isolating of clones, (see for example, Sambrook et al., Molecular Cloning: A Laboratory Manual, Cold Spring Harbor Press (1989); Mailga et al., Methods in Plant Molecular Biology, Cold Spring Harbor Press (1995), the entirety of which is herein incorporated by reference; Birren et al., Genome Analysis: Analyzing DNA, 1, Cold Spring Harbor, N.Y., the entirety of which is herein incorporated by reference).

[0192] The nucleotide sequence provided in SEQ ID NO: 1, through SEQ ID NO:5521 or fragment thereof, or complement thereof, or a nucleotide sequence at least 90% identical, preferably 95%, identical even more preferably 99% or 100% identical to the sequence provided in SEQ ID NO: 1 through SEQ ID NO:5521 or fragment thereof, or complement thereof, can be “provided” in a variety of mediums to facilitate use fragment thereof. Such a medium can also provide a subset thereof in a form that allows a skilled artisan to examine the sequences.

[0193] In one application of this embodiment, a nucleotide sequence of the present invention can be recorded on computer readable media. As used herein, “computer readable media” refers to any medium that can be read and accessed directly by a computer. Such media include, but are not limited to: magnetic storage media, such as floppy discs, hard disc, storage medium, and magnetic tape: optical storage media such as CD-ROM; electrical storage media such as RAM and ROM; and hybrids of these categories such as magnetic/optical storage media. A skilled artisan can readily appreciate how any of the presently known computer readable mediums can be used to create a manufacture comprising computer readable medium having recorded thereon a nucleotide sequence of the present invention.

[0194] As used herein, “recorded” refers to a process for storing information on computer readable medium. A skilled artisan can readily adopt any of the presently known methods for recording information on computer readable medium to generate media comprising the nucleotide sequence information of the present invention. A variety of data storage structures are available to a skilled artisan for creating a computer readable medium having recorded thereon a nucleotide sequence of the present invention. The choice of the data storage structure will generally be based on the means chosen to access the stored information. In addition, a variety of data processor programs and formats can be used to store the nucleotide sequence information of the present invention on computer readable medium. The sequence information can be represented in a word processing text file, formatted in commercially-available software such as WordPerfect and Microsoft Word, or represented in the form of an ASCII file, stored in a database application, such as DB2, Sybase, Oracle, or the like. A skilled artisan can readily adapt any number of data processor structuring formats (e.g. text file or database) in order to obtain computer readable medium having recorded thereon the nucleotide sequence information of the present invention.

[0195] By providing one or more of nucleotide sequences of the present invention, a skilled artisan can routinely access the sequence information for a variety of purposes. Computer software is publicly available which allows a skilled artisan to access sequence information provided in a computer readable medium. The examples which follow demonstrate how software which implements the BLAST (Altschul et al., J. Mol. Biol. 215:403-410 (1990)) and BLAZE (Brutlag et al., Comp. Chem. 17:203-207 (1993), the entirety of which is herein incorporated by reference) search algorithms on a Sybase system can be used to identify open reading frames (ORFs) within the genome that contain homology to ORFs or proteins from other organisms. Such ORFs are protein-encoding fragments within the sequences of the present invention and are useful in producing commercially important proteins such as enzymes used in amino acid biosynthesis, metabolism, transcription, translation, RNA processing, nucleic acid and a protein degradation, protein modification, and DNA replication, restriction, modification, recombination, and repair.

[0196] The present invention further provides systems, particularly computer-based systems, which contain the sequence information described herein. Such systems are designed to identify commercially important fragments of the nucleic acid molecule of the present invention. As used herein, “a computer-based system” refers to the hardware means, software means, and data storage means used to analyze the nucleotide sequence information of the present invention. The minimum hardware means of the computer-based systems of the present invention comprises a central processing unit (CPU), input means, output means, and data storage means. A skilled artisan can readily appreciate that any one of the currently available computer-based system are suitable for use in the present invention.

[0197] As indicated above, the computer-based systems of the present invention comprise a data storage means having stored therein a nucleotide sequence of the present invention and the necessary hardware means and software means for supporting and implementing a search means. As used herein, “data storage means” refers to memory that can store nucleotide sequence information of the present invention, or a memory access means which can access manufactures having recorded thereon the nucleotide sequence information of the present invention. As used herein, “search means” refers to one or more programs which are implemented on the computer-based system to compare a target sequence or target structural motif with the sequence information stored within the data storage means. Search means are used to identify fragments or regions of the sequence of the present invention that match a particular target sequence or target motif. A variety of known algorithms are disclosed publicly and a variety of commercially available software for conducting search means are available can be used in the computer-based systems of the present invention. Examples of such software include, but are not limited to, MacPattern (EMBL), BLASTIN and BLASTIX (NCBIA). One of the available algorithms or implementing software packages for conducting homology searches can be adapted for use in the present computer-based systems.

[0198] The most preferred sequence length of a target sequence is from about 10 to 100 amino acids or from about 30 to 300 nucleotide residues. However, it is well recognized that during searches for commercially important fragments of the nucleic acid molecules of the present invention, such as sequence fragments involved in gene expression and protein processing, may be of shorter length.

[0199] As used herein, “a target structural motif,” or “target motif,” refers to any rationally selected sequence or combination of sequences in which the sequences the sequence(s) are chosen based on a three-dimensional configuration which is formed upon the folding of the target motif. There are a variety of target motifs known in the art. Protein target motifs include, but are not limited to, enzymatic active sites and signal sequences. Nucleic acid target motifs include, but are not limited to, promoter sequences, cis elements, hairpin structures and inducible expression elements (protein binding sequences).

[0200] Thus, the present invention further provides an input means for receiving a target sequence, a data storage means for storing the target sequences of the present invention sequence identified using a search means as described above, and an output means for outputting the identified homologous sequences. A variety of structural formats for the input and output means can be used to input and output information in the computer-based systems of the present invention. A preferred format for an output means ranks fragments of the sequence of the present invention by varying degrees of homology to the target sequence or target motif. Such presentation provides a skilled artisan with a ranking of sequences which contain various amounts of the target sequence or target motif and identifies the degree of homology contained in the identified fragment.

[0201] A variety of comparing means can be used to compare a target sequence or target motif with the data storage means to identify sequence fragments sequence of the present invention. For example, implementing software which implement the BLAST and BLAZE algorithms (Altschul et al., J. Mol. Biol. 215:403-410 (1990)) can be used to identify open frames within the nucleic acid molecules of the present invention. A skilled artisan can readily recognize that any one of the publicly available homology search programs can be used as the search means for the computer-based systems of the present invention. Having now generally described the invention, the same will be more readily understood through reference to the following examples which are provided by way of illustration, and are not intended to be limiting of the present invention, unless specified.

### EXAMPLE 1

[0202] The cDNA library of the present invention designated SOYMON001, was prepared from soybean cultivar Asgrow 3244. This cDNA library was generated from leaves from V4 stage plants. The term V4 as used herein refers to the vegetative stage of plant development for soybean in which the plant contains four fully developed leaf nodes. The vegetative stages of soybean development are subdivided and designated V1, V2, V3, through V(n), except for the first two stages which are designated as VE (emergence) and VC (cotyledon stage). The last V stage is designated as V(n), where (n) represents the number for the last node stage of the specific variety. The (n) fluctuates with variety and environmental conditions. These designations are well known to those of skill in the art (see, for example, How a Soybean Plant Develops, (1996), special report No. 53, Iowa State University of Science and Technology, Cooperative Extension Service, Ames, Iowa)

[0203] The plants were grown under field conditions and the leaf tissue was harvested from the 4^{th} node. The tissue was removed from the plants in the field, placed in 15 ml culture tubes and immersed in dry-ice. The tissue was subsequently transferred to a −80° C. freezer and stored until the RNA isolation was initiated.

[0204] For the cDNA library of the present invention, the Superscript™ Plasmid System for cDNA synthesis and Plasmid Cloning (Gibco BRL, Life Technologies, Gaithersburg, Md.) or similar system is used, following the conditions suggested by the manufacturer. PolyA mRNA is purified from the total RNA preparation using Dynabeads® Oligo(dT)₂₅ (Dynal Inc., Lake Success, N.Y.), or equivalent methods.

[0205] The quality of the cDNA libraries is determined by examining the cDNA insert size, and also by sequence analysis of a random selection an appropriate number of clones from the library.

### EXAMPLE 2

[0206] The cDNA library of the present invention, SOYMON001, is plated on LB agar containing the appropriate antibiotics for selection and incubated at 37° C. for a sufficient time to allow the growth of individual colonies. Single colonies are individually placed in each well of 96-well microtiter plates containing LB liquid including the selective antibiotics. The plates are incubated overnight at approximately 37° C. with gentle shaking to promote growth of the cultures. The plasmid DNA is isolated from each clone using a commercially available kit such as Qiaprep plasmid isolation kits, using the conditions recommended by the manufacturer (Qiagen Inc., Santa Clarita, Calif.). A variety of plasmid isolation kits are commercially available.

[0207] The template plasmid DNA clones are used for subsequent sequencing. For sequencing the cDNA library SOYMON001, a commercially available sequencing kit, such as the ABI PRISM dRhodamine Terminator Cycle Sequencing Ready Reaction Kit with AmpliTaq® DNA Polymerase, FS, is used under the conditions recommended by the manufacturer (PE Applied Biosystems, Foster City, Calif.). The ESTs of the present invention are generated by sequencing initiated from the 5′ end of each cDNA clone.

[0208] A number of sequencing techniques are known in the art, including fluorescence-based sequencing methodologies. These methods have the detection, automation and instrumentation capability necessary for the analysis of large volumes of sequence data. Currently, the 377 DNA Sequencer (Perkin-Elmer Corp., Applied Biosystems Div., Foster City, Calif.) allows the most rapid electrophoresis and data collection. With these types of automated systems, fluorescent dye-labeled sequence reaction products are detected and data entered directly into the computer, producing a chromatogram that is subsequently viewed, stored, and analyzed using the corresponding software programs. These methods are known to those of skill in the art and have been described and reviewed (Birren et al., Genome Analysis: Analyzing DNA, 1, Cold Spring Harbor, N.Y., the entirety of which is herein incorporated by reference).

We claim:

1. A substantially purified nucleic acid molecule that encodes a soybean protein or fragment thereof comprising a sequence selected from the group consisting of SEQ ID NO: 1 through SEQ ID NO: 5521.

2. A substantially purified soybean protein or fragment thereof, wherein said soybean protein is encoded by a nucleic acid molecule that comprises a nucleic acid sequence selected from the group consisting of SEQ ID NO: 1 through SEQ ID NO: 5521.

3. A substantially purified antibody or fragment thereof which is capable of specifically binding to a specific maize or soybean enzyme or fragment thereof according to claim 2.

4. A transformed plant having a nucleic acid molecule which comprises:
(a) an exogenous promoter region which functions in a plant cell to cause the production of a mRNA molecule;
(b) a structural nucleic acid molecule comprising a nucleic acid sequence selected from the group consisting of SEQ ID NO: 1 through SEQ ID NO: 5521 or complements thereof;
(c) a 3′ non-translated sequence that functions in said plant cell to cause termination of transcription and addition of polyadenylated ribonucleotides to a 3′ end of said mRNA molecule.

5. The transformed plant according to claim 4, wherein said structural nucleic acid molecule is a complement of any of the nucleic acid sequences of SEQ ID NO: 1 through SEQ ID NO: 5521.

6. The transformed plant according to claim 5, wherein said plant is soybean or maize.

7. The transformed plant according to claim 5, wherein said plant is soybean.

8. A method for determining a level or pattern in a plant cell of a protein in a plant comprising:
(a) incubating, under conditions permitting nucleic acid hybridization, a marker nucleic acid molecule, said marker nucleic acid molecule selected from the group of marker nucleic acid molecules which specifically hybridize to a nucleic acid molecule having the nucleic acid sequence selected from the group consisting of SEQ ID NO: 1 through SEQ ID NO: 5521 or complement thereof, with a complementary nucleic acid molecule obtained from said plant cell or plant tissue, wherein nucleic acid hybridization between said marker nucleic acid molecule and said complementary nucleic acid molecule obtained from said plant cell or plant tissue permits the detection of an mRNA for said enzyme;
(b) permitting hybridization between said marker nucleic acid molecule and said complementary nucleic acid molecule obtained from said plant cell or plant tissue; and
(c) detecting the level or pattern of said complementary nucleic acid, wherein the detection of said complementary nucleic acid is predictive of the level or pattern of said protein.

9. The method of claim 8, wherein said level or pattern is detected by in situ hybridization.

10. The method of claim 8, wherein said level or pattern is detected by tissue printing.

11. The method of claim 8, wherein said plant is maize or soybean.

12. The method of claim 11, wherein said plant is soybean.

13. A method of determining a mutation in a plant whose presence is predictive of a mutation affecting a level or pattern of a protein comprising the steps:
(a) incubating, under conditions permitting nucleic acid hybridization, a marker nucleic acid, said marker nucleic acid selected from the group of marker nucleic acid molecules which specifically hybridize to a nucleic acid molecule consisting of the nucleic acid sequence selected from the group consisting of SEQ ID NO: 1 through SEQ ID NO: 5521 or complement thereof and a complementary nucleic acid molecule obtained from said plant, wherein nucleic acid hybridization between said marker nucleic acid molecule and said complementary nucleic acid molecule obtained from said plant permits the detection of a polymorphism whose presence is predictive of a mutation affecting said level or pattern of said protein in said plant;
(b) permitting hybridization between said marker nucleic acid molecule and said complementary nucleic acid molecule obtained from said plant; and
(c) detecting the presence of said polymorphism, wherein the detection of said polymorphism is predictive of said mutation.

14. The method of claim 13, wherein said level or pattern is detected by in situ hybridization.

15. The method of claim 13, wherein said level or pattern is detected by tissue printing.

16. The method of claim 13, wherein said plant is maize or soybean.

17. The method of claim 16, wherein said plant is soybean.

The application's sequence listing, which the Patent Office published only in electronic form, follows.

SEQUENCE LISTING (5521 sequences)

SEQ ID NO: 1 - DNA, 254 bp, Glycine max
  unsure (1)..(254): unsure at all n locations; Clone ID: 700547901H1
ggaaatctgaagctaccttaaggnaaatgnanatggccaanncgcaacactagtcatcgcttcaagctacttgncttttccttcnaactctgcactcttcattcgctgagattttcttcgaagagagattcgaagatggatggaagagccgntgggtgctanccgattggaaaaggagtgaaggaaaagcgggtaccttcaagcacacagcaggaaaatggtctggggatccngatgacnaaggtcttcagaca

SEQ ID NO: 2 - DNA, 285 bp, Glycine max
  unsure (1)..(285): unsure at all n locations; Clone ID: 700547902H1
gggcgcttctggngccgccacngctgttccttcgacgccgggcgngncgggnggcgctgcgccaaccggggactgcggcgggtnccctgttctgcaacggcatcggnggaagcccaccgnctagnctggcggagttcaccctgggcaacgancatganttctacgaagtgagcctggtggacgggtacnncctacccatctccatnancnccttcaaaggattccggaaaatgcactacnccgggttgcgtgaacgangtcaacnccatgtgccccgttgggctt

SEQ ID NO: 3 - DNA, 277 bp, Glycine max
  unsure (1)..(277): unsure at all n locations; Clone ID: 700547903H1
cggtgacccattcattggaagcctggaaaccccagttacatccagccctttgatcgcatggtacttgtccaacctgcccgcatacagaaccgcagtgagcccactactaagagggatcgaggtgggcctggcccacggataccttctggtgggcccattcgtgaaggccgggcctcttaggaacaccgagatcgccgggcaagcgggctctctggccgccggtgggcttgtggtgatcctcagcctttgcctcacaatctntgggatttcatccttc

SEQ ID NO: 4 - DNA, 219 bp, Glycine max
  unsure (1)..(219): unsure at all n locations; Clone ID: 700547904H1
agccatcatcatgggagcagtgattctcccagatctcggcaccgagattttgattccggtctgcgccatcattggaatagggttcgccctcttccagtgggtcctcgtctccaaggttaagctctccgctgccagagacgcttcccctaacgccgccggcaaaaatggctacaacgattacctcatcgnagaagaggaaggcctcaacgatcacnacgt

SEQ ID NO: 5 - DNA, 271 bp, Glycine max
  unsure (1)..(271): unsure at all n locations; Clone ID: 700547905H1
ctcgcgcacccttatcctcgttgctttctctttgcacntcattcttggctttttcgacgactcaccacctgcttcaaaagatgctacaaaccggaagaagcactagtgctatagttatcattcttccaggggataaaatattaggtctggcaaaaatttcttgggtattggaatcccaggagatgccaaggacttcttcaatcaagtcgagtcataggttttctagagagcaataggaaagtgcttactaaaaacaatcttatttaaatgc

SEQ ID NO: 6 - DNA, 245 bp, Glycine max
  unsure (1)..(245): unsure at all n locations; Clone ID: 700547906H1
gcggcttccaatggccactctgcaattcaccttgcaccgactcaaccacattgtncaggncttctctaccttccacgcgaaccttctctcgaaaccgaagcctcattgtcaaagccnctttcttcttgttctgacgacttctccaaaagnaggcgncgnttcagcgcngnaancgccgnactctcggnctcgctcccncagttannngngcgtgncgaagangcgcttncggagttggananagt

SEQ ID NO: 7 - DNA, 275 bp, Glycine max
  unsure (1)..(275): unsure at all n locations; Clone ID: 700547907H1
tcacaaaacaactttcaaactctgagaaagaatggctgccaacacattgatgagtactgctatctcagccttcccatctctcctttcttcctcaaaatccagatttgccancgcagttcctctttctagctttggtgtcaccaatgcctcttcttcncgcttttctatgagtgctgactggatgccaggcnagcctagacctccttancttgatggttcagcacctggtgactttggattcgancctcttngtcttggtgaagtaccagagaatc

SEQ ID NO: 8 - DNA, 273 bp, Glycine max
  unsure (1)..(273): unsure at all n locations; Clone ID: 700547909H1
anagcctagggttctttttctcttctgctctcactccttgcaaatctcgcgtaacgcatgcgtttcttcactcaatcggagcccagcactgatctatttggaactcttcgaggtctgtggttttactgtactcaatttgataaattaaggcannnnnnnnnnnnnnnnnnnnnnntcccctggtgtttatggatgtgtccatcgatggggatcctgttgaaaggatggtttttgagctttctatgatgttgctcccaagactgnagaaaactt

SEQ ID NO: 9 - DNA, 235 bp, Glycine max
  unsure (1)..(235): unsure at all n locations; Clone ID: 700547910H1
agcccattcaaggataacgaatttatgggtggatcaatttcaaaacggaggcgttctaggcaacgttcggcctcaaattttcttcctcggtatcaacaacctcatttcccacaaagccaagataatgggtctgtggggcattatgggtattcatctcagagctatagtggtggtcgtgctccagaacaagtaaagagctnggataggaagtatttaaggntaggtgatgattata

SEQ ID NO: 10 - DNA, 265 bp, Glycine max
  unsure (1)..(265): unsure at all n locations; Clone ID: 700547911H1
caaaaaacccaaatgcaggtttctccactaaaacttgggcgattttcanatttngtactttggcacccttcacatagtagttctcaccatgtccgatactaaaagaagtgccaacaacagcggttccaagcggagcctgccatcgtggacgaattcaagggaaaatgagagcgataacagtgcaaagaaaccaactttggatggccaaggtgagaaatccagtgacgctgagacaccccacaagagcaaagtccaaaatgaaaat

SEQ ID NO: 11 - DNA, 273 bp, Glycine max
  Clone ID: 700547913H1
gtcacaacccaagcctccgccgcgattttccggccatgtgcctcgaaatcgaggtttctgaccggctcttccggtaaactcaaccgggaagtgactatgaggccaatggggtgccctccttctgcctctttcaaggttgaagccaagaagggagagtggttacctggcttggcctccccaacttacctcaatggcactcttcctggtgacaatggatttgaccctctgggactagctgaggacccagagaacttgaggtggtacgttcaagcc

SEQ ID NO: 12 - DNA, 273 bp, Glycine max
  unsure (1)..(273): unsure at all n locations; Clone ID: 700547914H1
gcgtaacaacaataaaaatctcccatttgtnttttcttctcttcacgcacaccaacaaaacctctctctcatcggaatctccaaaaagaatggacaacaaaacgcagcagtccgagagtaagcaaaacgacaacgacgaggaagttgcgccaaaacgacaagaccctaacccgtcgtctggcgggtggggcttttcaccgctctcgtttctctccgatcttcagaaggccgccgctgttgcagccgaagagatctctcgcaatgctgctgtag

SEQ ID NO: 13 - DNA, 277 bp, Glycine max
  unsure (1)..(277): unsure at all n locations; Clone ID: 700547916H1
agaacaagtagttgagaactaagaaggagaagcaaatggcttcctcaatgatctcttccccagctgttaccactgtcaaccgtgccggtgccggcatggttgctccattcactggcctcaagtccatggctggcttccccaccagaaagaccaacaatgacattanctccattgctagcaacggtggaagagtgcnatgcatgcaggtgtgggccaccagttggcaagaagaagtttgagactcnttcctacctgccagaccttgatgatgcacatt

SEQ ID NO: 14 - DNA, 275 bp, Glycine max
  unsure (1)..(275): unsure at all n locations; Clone ID: 700547917H1
gagcatttcnaatggagcaagaaattggtgattcattttctttcgttgggnattgcattngcaatgatctggattcattgattggcttgcnacgggnncttgggtnctactctgaacacnaattttcaagatagctatgggtgttgnatatttttntgtgaagaattaatgagcataatgttttctggaaagantgggggcagacgaatctcattgtcaaganttacagagtttgagtgtgtcaaagcgacttgtgangagtgttagccagaagt

SEQ ID NO: 15 - DNA, 273 bp, Glycine max
  unsure (1)..(273): unsure at all n locations; Clone ID: 700547920H1
attctctccatatattatctcaaacccctctcacagaatgggaagtgctggaggaactgactatggtgcatacacttatgagaatcttgagagagagccttactggccatcagagaagcttaagatttccatcactggngctgggggttttatcgcgtcacacatagctcggcgcctcaagacagaggggcattacattattgcttctgattggaagaaaaatgagcacatgactgaggacatgttctgtgatgaattccatcttgttgatct

SEQ ID NO: 16 - DNA, 273 bp, Glycine max
  unsure (1)..(273): unsure at all n locations; Clone ID: 700547921H1
atcacaccatgccaccgctagtgacaatcaagagaactccttcaagaagggttctgctcgctctgccagtaaaagtcaggagaacaagtcatctggattatcaaagtcatcgactaatgcaaataattatggttcagtttcttctcaaagntcaagtgtacctgcaaacagtactgaggatgacatggatgattttgatccaagaggaacttctaccaaaacttcagctggaaactctaacccaggttgatctctttggacaagattaatcgg

SEQ ID NO: 17 - DNA, 245 bp, Glycine max
  Clone ID: 700547924H1
gacacgctcacgccgtcaaaccaacttgagtgcgttccaggaaacacatcccctctccatttcattcacttctctgctctctctttctcccacgaattcccaaacttattttcacgcttccaatttccgtcacgtaaaccatgcatcaccgcctcccaaattagggtttccgacaggcgcgtggaggaatcgatggcgaccgtgaatccgcagcctctgcagttcgaggaccctgctatacccgt

SEQ ID NO: 18 - DNA, 271 bp, Glycine max
  unsure (1)..(271): unsure at all n locations; Clone ID: 700547925H1
tttcttcccatttcacccctcgtctttccttgtttccggtgagggccaaccacaacatatgttaaacaaggaacaacctccaaaacataacatcctacgccaaacaaaactttgacctccttcagatctataccctnnnnnnnnnnnnnnntctattttcaaattctacatcatgggcacggaggttctacggccacaagattgtttcacccaacgcatcggtgttccaccgcctggcttttcccggcgaagaacctatggtacccaccac

SEQ ID NO: 19 - DNA, 270 bp, Glycine max
  Clone ID: 700547926H1
ccttattttctttccctagtcaaggagattcatctctgcagcaggttgttttagaaaagaaaaaatgctgaagatttgctgcattggggctggatatgtggggggtccaacaatggcagtcattgcactgaaatgcccctcaattgaagtggctgttgttgacatctctaaatccaggattgcagcatggaacagtgaccagctccctatctatgagccaggccttgatgatgtggtgaagcaatgtcgtggcaagaaccttttcttcag

SEQ ID NO: 20 - DNA, 269 bp, Glycine max
  unsure (1)..(269): unsure at all n locations; Clone ID: 700547927H1
cnagatttgaaggttcgttatgctccacatctcccacttgtcttgcgcggtcttacatgcaaatttcgtggaggactgaaaactggcattgttgggagaacaggaagtggtaaatccactctcatacaaacacttttccgaattgttgagcctactgccggccaagttatgattgacagcatcaacatctcttcaatggacttcatgatttgaggtctagactaagcatcatcctccagattccacaatgtttgaagggaccgtgagaa

SEQ ID NO: 21 - DNA, 268 bp, Glycine max
  unsure (1)..(268): unsure at all n locations; Clone ID: 700547928H1
cngctactgcagagngaactgagtgcactgttacaagtggtggtncgcgttaatattattgttctgccattgctttgactcattgttcatgccatttatgtttttacctatggtcttgtgttgtgcacttgtgcgtgtaactgtattctaaaataagggtcacttggatcagtggttgtaacgatatcaatgttttgcgagagtttaatttactcttgcagttattagtgaagatgagcggtctcatctcattgctcagtttaatcat

SEQ ID NO: 22 - DNA, 276 bp, Glycine max
  unsure (1)..(276): unsure at all n locations; Clone ID: 700547929H1
ctcgggctcttgcatcgatgaagaacgtagcgaaatgcgatacttggtgtgaattgcagaatcccgtgaaccatcgagttctttgaacgcaagttgcgcccgaagccattaggccgagggnacgcctgcctgggtgtcacacatcgtttccccaaacgcaaacatgtaacaatgttgctgcgcggggtgtatgctgacctcccgcgagcaaccgcctcgtggttggttgaaatctgggttcatgggccgactttcgccgtgataaaatggtggatg

SEQ ID NO: 23 - DNA, 273 bp, Glycine max
  unsure (1)..(273): unsure at all n locations; Clone ID: 700547930H1
gcaaagttagagacgagagaganagagagaaagggaaagaaacctaatacaataccctttttctcagaaatcacactctcacacccacttcccccaattcccattctctctgaattacgagggttttcgaaatcgaagagtctctgatcgatttcgattcggaaaaatggcgtcttcgagcgcaaccggtgctggatccaccgatcccacagctgccagaagaaacaccaagcgacccaagtattcaaagtttactcagcaagaattccagcg

SEQ ID NO: 24 - DNA, 275 bp, Glycine max
  Clone ID: 700547932H1
gccttatgggactacgttttcaacagttgcaagatctatggaatcaagcagatgctgatggaaatggtgtcatagactttgaagaattcaagcagaaaatatggaattctacatgtccagagcatgtgttggaaaatctgaatggttgcacggaagattgtaacacagaacaggagcaagaagctattggttttaaggtgaagaatgcaatgctgtatccgcgtgaagtggagaaaggactatggccagaagattattctctttctgatcatgct

SEQ ID NO: 25 - DNA, 269 bp, Glycine max
  unsure (1)..(269): unsure at all n locations; Clone ID: 700547933H1
ctcttgcaaaacctaattttcatttcttcnctcaaatttcaaaatgcgtgagatgccttcacatccagggtggccaatgcggcaaccagatcggcgccaagttctgggaggtggtttgcgcggagcacgggatcgaccctaccggaaggtacggtggggactcggagttgcagctcgagaggatcaatgtctactacaacgaggccagttgcggtcggttcgtgcncgcgcgcggttctcatggacctcgnancgggcaccattggaca

SEQ ID NO: 26 - DNA, 264 bp, Glycine max
  unsure (1)..(264): unsure at all n locations; Clone ID: 700547934H1
ttgtttgcatagganaaaaacacacacccttcatctgagcctgaatttgtatcatngagaattttcaaaaaggattgtctcttcagagacacagatcttgaggttggagtcaaatccttcacactttggtatggagacagaagagaggaaccagaaagggtgcaaggcttcggagccagagtttttcttgcagtnggggaacaggnngaggctgagatgtgtgagggngaaggaccctcggatttcagcgagactcaacggtgg

SEQ ID NO: 27 - DNA, 274 bp, Glycine max
  unsure (1)..(274): unsure at all n locations; Clone ID: 700547935H1
gcaattgaagttgaagtcttggcccttctctcttcaactccaaacacaagacatcatcatccatggctgcctccgtctccactgtcggagctgtcaacagagctcttttgaacctgaatgggtctggacctggggtttcagctcccagttcatccttctttgggagcagcttgaagaaggttattggctcaagggtccccaacacaaagatttccnctggaagcttcaagattgttgctgtagaagagaagaaaganattgaagaganccagcc

SEQ ID NO: 28 - DNA, 269 bp, Glycine max
  unsure (1)..(269): unsure at all n locations; Clone ID: 700547936H1
caattgaagttgaagtcttgcccttctctcttcaactccaaacacaagacatcatcatccatggctgcctccgtctccactgtcggagctgtcaacagagctcttttgaacctgaatgggtctggacctggggtttcagctcccagttcatccttctttgggagcagcttgaagaaggttattggctcaagggtccccaacacaaagatttcctctggaagcttcaagattgttgctgtagaagagaagaaagagattgnagagaccca

SEQ ID NO: 29 - DNA, 270 bp, Glycine max
  unsure (1)..(270): unsure at all n locations; Clone ID: 700547938H1
tagatgtggcttgccccagagatgataagaagaggattagcgcagagcagcactgcgtgggcacgagacatggtcaacatgatagcttgtnagggggttganagggtggagaggcatgaactttttggaaagtggaggtcaagactttccatggctggatttaaacagtgtcaattgagttcttcagtgatggttgctacccaaaatctcctaaaggagttcagtcaaaattataggcttgaacatagagatggtgctctttatcttggc

SEQ ID NO: 30 - DNA, 271 bp, Glycine max
  unsure (1)..(271): unsure at all n locations; Clone ID: 700547939H1
gaaaatctgaagcccgaataaatttaaggnggagggatcagagaggtgttgacacttccattttacgaaaactcaattaatgtgaaatcaggtcaacacctgatttcagttcttttgtattcaacagagggaacgaccgagcaaagcaaatggggtgctcattctccggtctgaatgccttatacgactccgttaacggcggaggcgatgtttggatcaacgagaaccgtttccgcatcgttcgccagctcggagaaggtggcttcgccta

SEQ ID NO: 31 - DNA, 268 bp, Glycine max
  unsure (1)..(268): unsure at all n locations; Clone ID: 700547940H1
cgcaatcatcggcattgtcgtcnccgccgtcggaggtcagtctccagcggcggctcccaccacttcctcggnatcnccagccacagccccttcnaaacctaaaccaaaatcanctgcgccagttgcttctgccaattcatctcntccagcttcatcccccaatgctgcaaccgcaanccctcccgtttcgtctcccacggtagcatctcctccgtntaaagtgctgctncagtccagnaancatnctccggggcnanacttnccgcgg

SEQ ID NO: 32 - DNA, 261 bp, Glycine max
  unsure (1)..(261): unsure at all n locations; Clone ID: 700547941H1
ttaaaaatggaagacttgctatgtttgccatgcttggtttctacttccaagcttatgtncactggagaaggtcctgntgagaaccttgcaaaacatctcagtgacccttttggcaacaacttgctcactgtcatttctggatctgctgagagagctccaactctctaaatcattcatcttcatgtttttctccaatcttacttaatgtacaatacatatcactgagatattaaggcattggctttgttccttggaactcaa

SEQ ID NO: 33 - DNA, 270 bp, Glycine max
  Clone ID: 700547942H1
ggggagaagaggtcgagtttcacagcagcaatggtgtacgtcaaggctcagaaatcaaaagcctacttcaagagatatcaagtcaagttcaagagaagaagagagggaaaaaccgattaccgtgccaggattcggttgattaatcaggacaagaacaaatataacactccgaaataccgatttgttgttcgctttagcaacaaggacattgttgcacaaataatatctgctagcattgctggcgatattgttcttgctgcagcatatgca

SEQ ID NO: 34 - DNA, 270 bp, Glycine max
  unsure (1)..(270): unsure at all n locations; Clone ID: 700547943H1
gaccaacaaatatagtaagtctttcaggggaagtgtcagctcctgtcaagcctgaancacaaaaggcacctccacctattgaagctccagccttatctttagatgagctgaaggngaagacagacaactttggttcaaaggcattaataggtgaaggatcgtatggaagggtgtattatgcaaccttaaacaatggaaaagccagtggctgtgcaaaaagcttgangnttcatctgaacctggaatcnatnatgagttttgaccccggnt

SEQ ID NO: 35 - DNA, 266 bp, Glycine max
  Clone ID: 700547944H1
aaaaaccacaaccaccaccatctagggtttttctttttctcatggctagtttgtcaactaggattttcttcatcatgtcccttgtgtgcctggctctcggtccaatggcacaaggggaaatgacatgtggccaggttgtgagcaacctgaccccatgcatctcctatgtggtgtatggtggaaccaatgttcctgaacagtgctgcaatgggataagaaatctctatggcatggctcagaccaaaccagaccgccaagctgtttgc

SEQ ID NO: 36 - DNA, 268 bp, Glycine max
  Clone ID: 700547945H1
tctctcccaaaatctccctctgttcagtttcaatatggcgaacacactatataacggcgccacatgccgaatccctctccgtgatgaatccctggccttctctcgccacgtttccagatccctctctttcctcctcaaaacacgtgcgggaaaacaatcatacgcatttgcggttaaggcttcttcgcactctgacttcgacgttgacctttcgctcagtccacgtgtcaatgccgtcaagccttccaaaaccgtcgccatcagcgac

SEQ ID NO: 37 - DNA, 268 bp, Glycine max
  Clone ID: 700547946H1
gaagattgttgacgtgctgcttgagcaaaacattgttcctggtattaaagtcgacaagggtttggtgccccttgcaggttccaacgacgagtcatggtgccaaggtttggatggtctagcctctcgctcagctgcatactacgagcaaggtgcccgtttcgccaaatggcgtactgttgtgagcatccccaacggtccctctgctctggcagttaaggaagcagcctggggtctggctcgctatgctgcaattgctcaggacaatggg

SEQ ID NO: 38 - DNA, 276 bp, Glycine max
  unsure (1)..(276): unsure at all n locations; Clone ID: 700547949H1
cgnaggggactacactcatcagatctctaacattataagcnaacgcttcctgcaccacaaactgtccttgctccctttgtgaanatcctggatgaagantttggaattgtgaagggaaccatgacaaccacacattcctacacaggagancagaggcttttggatgcttcacaccgtgacttgagaagagccanggctgcagcactgaacattgtcccaaccagcactggagctgccaaggctgtgtctcnagtgttgccacagctgaagggcaag

SEQ ID NO: 39 - DNA, 251 bp, Glycine max
  unsure (1)..(251): unsure at all n locations; Clone ID: 700547950H1
ctcttcttgncagtattnttctaatccacnaaaataatggnccttaaattcacaacattggccctcgccttctctacggttctcacgctgcttctccttcccttaccaacccttggggagctcgtgcaggngcngccactagtcctcaagtaccacaacggccaactcctgaaggggcgcatcaccgtcaatctcatctggtacggcaccttcacgccgattcaacggtncntaatcgtggactttcataa

SEQ ID NO: 40 - DNA, 274 bp, Glycine max
  unsure (1)..(274): unsure at all n locations; Clone ID: 700547951H1
ttggtggctagctaagctaagctaaaactaaactctttcagtttgttttagctttcagcttcttctgcttcttttgctttttccaccacaaccacaaccatgtcttctgccactgcctccaacactttcttcattcactcttgtttcctcctcttctgtctcctctcggctccttcctgtgtttccatgttctctggtattgagacaggagatttagaaaaaagagatgatntgttntccacagattctaagagacgaggcagtgggcaaggct

SEQ ID NO: 41 - DNA, 269 bp, Glycine max
  unsure (1)..(269): unsure at all n locations; Clone ID: 700547952H1
acacaaggaaatatttctagatattgcatgtttcttgtacgattcatgatgtgatatatgtgnaggaaattctagattttcgtggatttaatcccgaatacggcctacaagttctcgttgataaatcacttataaccatgcgnangatagttgaaatgcntgacgttttgcgcnatttgggcnagtatattgntagagaaaaatcaccttgggatccatggaagtggagtaaggtgtgggattcnaaggtctcccacatagttcgntgg

SEQ ID NO: 42 - DNA, 267 bp, Glycine max
  Clone ID: 700547953H1
cgcaattgttctcagcatgcagacttcgagattgtgactgtttagaatgtattcaaagtatacttcgcggaggaggtttggctcatgctgaggtcgaagttaaccccgatacttggatccttatgatctaaaacaagaattagtgcttggtatagtttgattgggaaaaaattggatatcttcatatatatgtgattgatttttgaaaaacaggctatagtgaaatagaaattcaaatacattttgcaaattgtatcttgagttcga

SEQ ID NO: 43 - DNA, 91 bp, Glycine max
  unsure (1)..(91): unsure at all n locations; Clone ID: 700547955H1
ggaaaaaatggtgtcgctgaaactgcagaagcggctggccgcaancgtgctcaagtgtggcagaggaaaggtgtggcttgaccccaatgaa

SEQ ID NO: 44 - DNA, 251 bp, Glycine max
  unsure (1)..(251): unsure at all n locations; Clone ID: 700547956H1
gaatcagtgaacgaggggcaccctgacaagctctgtgaccagatcctccgatgctgtgctcgatgcatgcttggagcaggaccctgacagcaaggttgcctgtgaaacctgcaccaagaccaacatggtgatggttttcggagagatcacaaccaaggccaacgtggactatgagaagattgtgcgtgacacatgcaggaacattggttttgtctctgatgatgttngtcttgatgctgacaactgcaagt

SEQ ID NO: 45 - DNA, 268 bp, Glycine max
  unsure (1)..(268): unsure at all n locations; Clone ID: 700547957H1
cacactatagcaataganacatttgcttttgaaaaacccctcacttcttcatcactacactagctagccacatacaatgtcgaccaaatttaaggtgtttcgtgaattcacaagcgatgactcattcctaaaccaagttatccctgaaaacatcaccgaattccaagtgactctgtccctcgctagagactacgatggcaacaactcaaccaacggaaagttcattccttactgggacactgaaaaggtcactcccgaagtgataaaa

SEQ ID NO: 46 - DNA, 267 bp, Glycine max
  unsure (1)..(267): unsure at all n locations; Clone ID: 700547958H1
cggntcganagaagattgggatgacaaagaatatattcctgatcctgaggataagaaaccagaggggtatgatgacatcccaaaagagctcccagaccccgaagccangaagcctgaaagattnggatgatgaggaagatngtgagtggacaccccctaccatgccaaccctgagtacnaggcccatngaatggcagagaaaatcaagaaccccaatatnnnggaaaatgganggcaccattgattgataanccagatttcanggat

SEQ ID NO: 47 - DNA, 257 bp, Glycine max
  Clone ID: 700547959H1
aaaaaagtcgtttttttattttttttattttcaaccatggctggtgtgaaccccgaggcaggagggtggaaggcttatccttctgttatggagactgctcttgatagtggtgatggaaggagtcatcataacatgagtgatgatgggtcggtgatgcatttctctgctacaaggtcagtggcagtgccatcatctggacagaataaagtgattcctagtccaactcagtttagcatcctctataaggggaaaatgtg

SEQ ID NO: 48 - DNA, 267 bp, Glycine max
  Clone ID: 700547960H1
tgaagggtggtagcagaaaaaaatggactcacatctccccgaccacttcaagtgtccaatttccctcgaaataatgtcggaccctgtcattctctcttcgggtcacaccttcgaccgttcctccatccaacgttggctcgacgcgggtcaccgaacatgtccaattaccaaactacccctccccgaccaccccgccctcatccccaaacacgcgctgcgaagtttaatctccaactacgcattcctctcacttctccaacaatacgt

SEQ ID NO: 49 - DNA, 267 bp, Glycine max
  unsure (1)..(267): unsure at all n locations; Clone ID: 700547961H1
tgaaagatgcttactgtttgctcaactttggagacagtatcacaactgaccacatctctccagctgggcagcatacataaggacagtcctgcagccagataccttatagaacgtggggttgatagacgggacttcaactcctatggaagtcgccgtggtaatgatgaggtgatggcccgaggaattttgcccaatattcgcattgtcaacaaatttttggaatggagaagttggacctaaaactattcatattccttctggggngaa

SEQ ID NO: 50 - DNA, 269 bp, Glycine max
  unsure (1)..(269): unsure at all n locations; Clone ID: 700547962H1
ctctcttgtctgtgcaatcaaaacaacaacattcattcatactgatcacttccttggcctantgcacattcttcatcacttcattcaacatttctctctcccttagctagtttttaccaatggctgctgcggttagtgctgcagtctcttttccatccaccaagtctacctctctcccaagcaggacctccatcattaccccagagagagttgtattcaagaaggcttcattgcaatacagagatgtttgtagcagtggaagggtagtt

SEQ ID NO: 51 - DNA, 269 bp, Glycine max
  Clone ID: 700547963H1
caaaggttgctgtaggagataagattgcagtagtgctaagtgctaacacctgcagtgaacaatggcctctgcatcagcatctctgctcaagtcttcacttgttcttgacaagtctgagtgggtgaagggacaaacccttcgccaaccttctgcatcagttgtgagatgcaaccccaccaccccatcaggcctcaccatcagagctggttcctatgctgatgagctcgttaagaccgcgaaaacagtggcttcaccagggaggggtattt

SEQ ID NO: 52 - DNA, 270 bp, Glycine max
  unsure (1)..(270): unsure at all n locations; Clone ID: 700547964H1
cncaggtatccgaaacgatttcgcggnnantagtggcangttcaagaacgggatcttcnaaatctccggtantaagacggtatccganttcaccaagattcgcntccagtttccttcagcttggatccgaagaggnacacgattctcgacggngtcctcgganttacagaggatgtggttgccttcgccagaagcgtagtttgcatccagaaacttggctcgattttccccttcccgatgatgaggattctgatgattttgattgtccga

SEQ ID NO: 53 - DNA, 274 bp, Glycine max
  unsure (1)..(274): unsure at all n locations; Clone ID: 700547965H1
cagaaacagtagaanaaacanctanagaagtagccccanaggagcctanngnagtttccagttgagaccgaggaggtggtggcaaaggagacagaggaagagaagccagcagaagagaaatcagaggagaaanctgaagaagtgaaagaagaagcagaggagcctaaaganactactganacagnatcagcagcagcaggcaccaccagcaaccacagagggaagagaacaaaccagctgagtcagttggaaccccagtagaggttcctgttga

SEQ ID NO: 54 - DNA, 269 bp, Glycine max
  unsure (1)..(269): unsure at all n locations; Clone ID: 700547967H1
gagctgtcaacggagctccactgagcttgaacagctctggagctggagcttcagttcccagttncagccttctttggcaccagcttgaagaaggttattgcctcaaaggtccctaacgtcaagatttcttctggaagtttcaaaatcgttgccgcggaaaaagagattgatgagnaacaacagacagncaagggcagatggaaaggtcttgcctatgatgtttcagacgancagcaagacatcacaagagggaaggtttngttgattcc

SEQ ID NO: 55 - DNA, 269 bp, Glycine max
  unsure (1)..(269): unsure at all n locations; Clone ID: 700547968H1
cngcaattcactctgtacaattcttcgttcgttctctgcagttatatcctttttgagcttcaatggcggacgtgaaaccttncgctttccagngctgagatcaaccagcttctaagtcncatcatcaacacattctacagcaacaaggagattttcttgcgtgaactcatcagcaatgcttctgatgctttggataagattcgattcgagagcttaaccgacaagagcaagctcgatgctcagccagagctcttcattcgtcttgtgcc

SEQ ID NO: 56 - DNA, 268 bp, Glycine max
  Clone ID: 700547969H1
gacaaacaagtagttgagaactaagaagaaggaaatggctttcctcaatgatctcctccccagctgttaccaccgtcaaccgtgccggtgccggcatggttgctccattcaccgggcctcaaatccatggctggcttccccacgaggaagaccaacaatgacattacctccattgctagcaacggtggaagagtacaatgcatgcaggtgtggccaccaattggcaagaagaagttcgagatctttcctacttgccagacctcgatga

SEQ ID NO: 57 - DNA, 66 bp, Glycine max
  unsure (1)..(66): unsure at all n locations; Clone ID: 700547970H1
gagctacatgtcaaanacaggganaagcttctcacatcccttcgnnaacacctctncgantcntct

SEQ ID NO: 58 - DNA, 266 bp, Glycine max
  Clone ID: 700547972H1
aagttaaaagtcttagccttccctacaactccaaacacaaagacatcatcatccatggctgcctccgtctccactgtcggagctgtcaacagagctcttttgaacctgaatggttctggagctggagcttcagctcccagttcagccttctttgggaccagcttgaagaaggttattgcctcaagggtccccaacagcaaggtttccggtggaagcttcaagattgttgctgtagaagagaagaaagagattgaagagacccagca

SEQ ID NO: 59 - DNA, 268 bp, Glycine max
  unsure (1)..(268): unsure at all n locations; Clone ID: 700547973H1
gacntaacaacagcacaaagcgggttactgtctgttcaagntanccatctntgctctctctttcttagtgcctccttgcnagaagntanaatggcccaagnaaactttcctattcacatctgaatcagtgancgaggggcaccctgacaagctctgtgancagatctccgatgctgtgctcgatgcatgcttggagcaggaccctnacagcaaggttgcctgtgaaacctgcaccaagaccaanatggtgatngttttcggagagatc

SEQ ID NO: 60 - DNA, 266 bp, Glycine max
  unsure (1)..(266): unsure at all n locations; Clone ID: 700547975H1
ctctctttcaattccttcacactctcccctctccattcaccattactcccctcttcttccanttntgctcttcccaccacctctgcttcaagagcaaacgtgattctgcccccgaagcccttgaatggagttcgaatctcgacacccaaaaggaggactgagtcggtgattgtctccgccgccgcggaggacgcgagttcggctgtggagggtgggtcgccgccgcntcctccggcggagagcgaganagagagcggcgcctccgt

SEQ ID NO: 61 - DNA, 263 bp, Glycine max
  unsure (1)..(263): unsure at all n locations; Clone ID: 700547976H1
gctgcacaanctcttgtatcatcatcatctcttaccgtctcagccgaggctacnatacnaagtcttggaccaagatcactccaatctccagttggcttctcaagaaaagcctcctttcntgtaaaggcagctgctactcccnntgtcaagcaaggatcagacagacctttgtngtttgcncaaagcaaagtctttcctanttggatggcngcnttccgggtgnctatnganttgagcctcnnggacattcggaanctgaanga

SEQ ID NO: 62 - DNA, 267 bp, Glycine max
  unsure (1)..(267): unsure at all n locations; Clone ID: 700547977H1
atgactttganttggcgggatccttgggccttcctccttcaaatggagtccttccacagtcccccatgcatacaaagagtttagcagttcttaggaggcggatgatccgaaagaaggtggtgaagagcgccaaggaatgtattaagcaacgaaggaccaactctgaattatatggaaagatgcaagaggtgattgtagaaatggatacagaccctacggttaaagaattggagaatttgaaggaggctgtaatgcaatctgatagca

SEQ ID NO: 63 - DNA, 265 bp, Glycine max
  unsure (1)..(265): unsure at all n locations; Clone ID: 700547978H1
ttatgtacccttggtctcttgttaagcgtgtaaaaaggtgctgggatagaatanaaacctggttgaccaataattttcctgaagcgngaggccactctttgtanaggtgcaactgaagctgacattcaggagttggagaatgtattaaaggtgaaattgcctcttcctacaaggatcctttatcgcnttcacaatgggcaagaatttgcaaaggcagatccagaaactagtacatttggcagatctttgggtctaattggtggct

SEQ ID NO: 64 - DNA, 239 bp, Glycine max
  unsure (1)..(239): unsure at all n locations; Clone ID: 700547979H1
gattatttcnctttgangagtgttgaacgngccaagatggtaaacgnggacgagtgggtgcgagcggcgatggcggacgacaccgtngtggtggagcttctgctacgcctcaagcaaggtaccgtttcacacaaatctcancancagcttatacctttctcctggggtgtcaaacagccgcgctcaagatcaaggcttagcgccgccgtctctcgctgcgacgccgcngtttcaaccag

SEQ ID NO: 65 - DNA, 268 bp, Glycine max
  unsure (1)..(268): unsure at all n locations; Clone ID: 700547980H1
gcaagctagaacctacagatggaatctgacagcaaatgcngctaggcntaatccacaagggtcattccattatgggaagattactcctacaaaagtaattaaggtggccaattcagcacctttgatcaatgggaagctccgttatgctgttaacagtgtctcnatatggttaaccctgacaccctctcaagcttgctggattacntcaacattcccggagtcttcagtgtgaatttactcccaaaatctcctcaaacggtctaggata

SEQ ID NO: 66 - DNA, 266 bp, Glycine max
  unsure (1)..(266): unsure at all n locations; Clone ID: 700547981H1
ccaaatttcactgccagcgaggcagagagagaaactagagaganagagagagcgaacacaccgttcattnnnnnnnnnnnnnnnnnnnnnnttcgccgtcgcattttccggcgaggtttctctgttttgtttaaccgaaatggaggatccgtacgttctcggttggattctgtgctccgtcctgagcctcttggcgctctacancctggccttcggcggagcgggccgtcgccgcgcttcgcggagaagaagaagagttatcggag

SEQ ID NO: 67 - DNA, 269 bp, Glycine max
  unsure (1)..(269): unsure at all n locations; Clone ID: 700547983H1
agaaaaacaagtagttgagaactaagaagaaggaaatgggcttcctcaatgatctcctccccagctgttaccaccgtcaaccgtgccggtgccggcatggttgctccattcaccggcctcaaatccatggctggcttccccacgaggaagaccaacaatgacattacctccattgctagcaacggtggaagagtacaatgcatgcaggtgtggccaccaantggcaagaagaagttcgagactctttcctacttgccagacctcgatga

SEQ ID NO: 68 - DNA, 265 bp, Glycine max
  unsure (1)..(265): unsure at all n locations; Clone ID: 700547984H1
cctcacagcactcatcgattcttttggtgccttatttgtctattcggttgaagttgaataatagaacattccatggctgaagaaatgaaaatggtagaacctggaagaggtaagaggaagtttttcaaaacgcaaggccataaaaagtcaagtaagaaagcaaaagtgatgccaccacaacatggacaaaagaaagttaaaatagacaanaaaatgaagaaacttttccgcaagcgagcacgggagtataattctgatgatggag

SEQ ID NO: 69 - DNA, 266 bp, Glycine max
  Clone ID: 700547985H1
tcaccaaagccttcctagaacgaaaaaaaaaagaagagcaattttccctcaccaaagaagaagaagcaaacaatggccgatcaacttaccgatgaacagatctccgagttcaaggaagccttcagcttgttcgacaaggacggcgatggttgcatcacaaccaaggagcttggaactgttatgcgttcattggggcaaaacccaactgaggcagagctccaggacatgatcaatgaagtggatgctgatgggaatggtaccattga

SEQ ID NO: 70 - DNA, 192 bp, Glycine max
  Clone ID: 700547986H1
gagttgctgattgatggttcctactttggggttcatatatgtttcaagttcttgtgcagaaacctttgtcactgcactcaaaatctgcactagctaggtggaacagaaatggcagaggattggaaccgcacggctcttcttgtgatcgatatgcagaaagattttatagaagattggagtcctgtggcacta

SEQ ID NO: 71 - DNA, 192 bp, Glycine max
  unsure (1)..(192): unsure at all n locations; Clone ID: 700547987H1
atgatctgtgatatggaaattgggaactcgtgttatgtaaagatgtgatgtggtgtggctagtgtgaaccgtttgcttgcttcgtgtatggtacattctctccggaggcaccgtcgtgagcttttctctctggtccgtgttgctgaaaccttttgacctttccantaaagcatttgtttcaccctatcaatg

SEQ ID NO: 72 - DNA, 264 bp, Glycine max
  unsure (1)..(264): unsure at all n locations; Clone ID: 700547988H1
gcaaaataaaagcctggttatacgataatatgggttctagggntgattatgatnccccaggtcattggtgtactacaatgctttacagtgctgatggaagtagactgttttcttgcggaactagtaaagatggagagtcatttcttgttgaatggaatgaaagtgaangagccattnagagaacatacaatgggntcagnaagaaatccactggntttgtgcagtttgacacaacccaaaatcgntttttggctgctggtgnag

SEQ ID NO: 73 - DNA, 267 bp, Glycine max
  unsure (1)..(267): unsure at all n locations; Clone ID: 700547989H1
acaattcacaanngananagtttccatctcnctcacaaaatgacaacganatcgaattgcncccntgctgcttnctcttnctcttnntctcnacnctccanatagcttccagccnctnaacccccagcaanttcatcaagtcttcgnggagcaccacccagtanccagccctctgcatccngtccctcnccgtctacgcctcgaccatccagcaaganncccacgagctcgtccaganagcnctgntcgtctnccncaaccanagcg

SEQ ID NO: 74 - DNA, 265 bp, Glycine max
  unsure (1)..(265): unsure at all n locations; Clone ID: 700547991H1
cnctactcaaaaaggatttcnggacatcatgtgcagtgattcgaaaagtaaactttcttccccaaacccttcgtcgtcatggagaatagtaacattcagaagcngaatctggatggtctctacaactcggttttgcntgaantgtctgcatctgatgattatgaagctttccaaagagnggtggaggaaaaaggcntagatgtgaacgaggcaggcttttggtacggtngaanaattgggtccaagaagatgggtctgaaacgag

SEQ ID NO: 75 - DNA, 262 bp, Glycine max
  Clone ID: 700547992H1
cgcgcttcgggttagggttagggttagggaattagggcttcgaacttcgacgcaatgtccgtccattaacccctcacgagtaccgctccctccgccttcgccacgcgccggccgtgggaggagttcttcgcgctccactcgttcacgcgcccctacaccctcggcgagaccacgctccgtgtgaagcgcaacctcggccacttccgcgtgaactacgccatggtcgtgctcctcttcgtgttccttagcctcctctggttcc

SEQ ID NO: 76 - DNA, 263 bp, Glycine max
  Clone ID: 700547993H1
gaaaacgtgatgtgatgtgatgtgatgtgatggagtctacaaaggaacaatctggaatgctgcacaagatcctacctccacgtctagaagatgccggcctcgaagatcctgcccttccacccgattccatccacgaagcttttctgaaggccgccgccgccgtcaaatcacgcgccgcctccattttctcctccaccgacgacgacaacgacggaggttgcgtcaggacccgtggcccagcgccaaggacgcctccgatgcag

SEQ ID NO: 77 - DNA, 263 bp, Glycine max
  Clone ID: 700547994H1
gctccaatagcgtatatttaagttgttgcagttaaaaagctcgtagttggaccttgggttgggtcgatcggtccgcctccggtgtgcaccggtcggctcgtcccttctgccggcgatgcgctcctgtccttaactggccgggtcgtgcctccggtgctgttactttgaagaaattagagtgctcaaagcaagcctacgctctgtatacattagcatgggataacaccacaggattctgatcctattgtgttggccttcgggat

SEQ ID NO: 78 - DNA, 280 bp, Glycine max
  unsure (1)..(280): unsure at all n locations; Clone ID: 700548001H1
cagtcctctgaagataataacaaagtagtgagtagtgagtagtccaaccagaatccagaatccaaagctttttttttttgtccaaatgccatgtctcggagccaccaagagcagccactattagcggactcgttcatagaagaaacgaggcgcaaganacagcctacgactcctccgagaagattgtggtggttggagtggacgagtccgacaacgaggacaattgggggagagtacccccattctctgaagatgctatggctgtatacagggccgggct

SEQ ID NO: 79 - DNA, 276 bp, Glycine max
  unsure (1)..(276): unsure at all n locations; Clone ID: 700548002H1
ctctctctcagaatttctatctatctcttgtttcaatttcaacaacggttactcctttttcgttttgagtttcaatcaagccatcatcatgtctaccgcatcgcaacccaaggccaagaaaacggcgtcgtccaagaagccctctcccaccctcccttcgccgtggtactttcccaaaatactctccttcaaaatcaattctcttagtttatntcttttccaattgtatttaatttgattatcgtgatgatagcagaggcgattgcgagtctgaaa

SEQ ID NO: 80 - DNA, 275 bp, Glycine max
  unsure (1)..(275): unsure at all n locations; Clone ID: 700548004H1
gagaatggctcccaagggtttaacctttctggctgtgttaatatgcgtttcagcactgtcactgagtccttctgtngcgggggaagggcaaaataatggccttgttatgaacttctacaaggaatcatgccctcaggctgagacatcatcacagaacaagtcaagcttctctacaagcgccacaagaacactgctttctcctggctcaggaacatcttccatgactgtgctgttcagagttggtgcttcactgttgctggactccacaagaagga

SEQ ID NO: 81 - DNA, 277 bp, Glycine max
  unsure (1)..(277): unsure at all n locations; Clone ID: 700548005H1
cnggctcagangnanaganaagcaaccacaaatngttctcacatccactgccacacacccagatgaacaagaccagagcctaaactatacttttgcttccagatatgtgcgtgaacctattccaaagttcaagatgccggaaaatccataccaaaagatgctgcttatcagataataaacgatgagttgatgttggatggtgcaccaaggctcaacttggcctcgtttgtgaccacttggatnngcctgagtgtgacaagctcataatggcttcact

SEQ ID NO: 82 - DNA, 218 bp, Glycine max
  unsure (1)..(218): unsure at all n locations; Clone ID: 700548006H1
cctccaaattttcnnttcattctcacgcgccgccgtggtttccgccggcggctactccctatccaccgcgcatccatcccgcttccctctcctcgcttttctcacaaaacaaaaaaattaaaaatttctccgaagactgtgtattatcgttatcgatcactgagttaggttttgctgttcntcctagggtttattgtgtccaataacaagnggaggga

SEQ ID NO: 83 - DNA, 271 bp, Glycine max
  Clone ID: 700548007H1
agcaaacctatttggagaaacatcttccttcgttaccaaccttgggagacaggcaagatgcattcagcgtttattttgaatgggataatgattttggaattccaggagcattttacatcaaaaattttatgcaatctgaattttcctcgtgagtgtcactcttgaagacattccaaatcatggaaccattcactttgtttgcaactcatgggtttacaatgcaaaaagttacaaaaggggtgatttcttgctaataagacatatctcccaa

SEQ ID NO: 84 - DNA, 274 bp, Glycine max
  Clone ID: 700548008H1
tcagatttctaaaggtggctattccatcactctgcgtccacctggtgaacatgctcactggttcaccaaagccaccctccaaaggtttgttagatttataagcactccagaagttctagagaggtttgtgacaatagaaaggagattgtgcagattgaaggatcgattcaatcaagtgagaggaacaatttgttggcagaagcagaaggaagcatttcatctactgatgggcgtgtcaaaagtcaacaacttcctctaagatgaaagatgaatc

SEQ ID NO: 85 - DNA, 275 bp, Glycine max
  unsure (1)..(275): unsure at all n locations; Clone ID: 700548009H1
gaaactctttctcttcttccgtttcctagtctcacacccaaacctcatggaaggctctgtcaacgaacgtcttgattttgggaagatgggatatgggtgcaatcattaccggagaagatgcaggattcgtgctccctgctcaacgagatctactcatgccgtcactgtcataacgacgctgcgagcttgttgaagaatccctttgatcgccacgagctcgttcgccaagatgttaaacaagtgtttgtncagtttgtgacactgagcaacctgtt

SEQ ID NO: 86 - DNA, 255 bp, Glycine max
  unsure (1)..(255): unsure at all n locations; Clone ID: 700548010H1
cgcaactatttctgactacgttttgctctacgcctctcccacnctctcaaacatcgttctcttcgattttagggttttgttttgctgctgcctccgttccccccttctcataaacaacgcgtttctcttctgcttcgtatctattctttgcttttggttttggttgattcaaggccttcacagcattcgttgcggcattttaatcgatttatccaagcaggatgaatgaataatggagtctaaaggtgggaaaaa

SEQ ID NO: 87 - DNA, 275 bp, Glycine max
  Clone ID: 700548011H1
gttatctttagcacagtgttgaagataacgaacgaatagtgccattactgtaaccaaccatggtttccgtcttcaacgagatcctattcccgccgaaccaaacccttcttcgcccctccctccattccccaacctctttctcacctctcccactcgaaaattccctcgctctcgccctaaccctattctacgctgctccattgcggaggaatccaccgcgtctccgcccaaaaccagagaccgcccccgtggactgcgtcgtcgtcggcggaggc

SEQ ID NO: 88 - DNA, 275 bp, Glycine max
  unsure (1)..(275): unsure at all n locations; Clone ID: 700548012H1
gaaacaagacaagaccacagagaagttcttctttggccctnccagcaatgtggagggctttagctccagaaatttaagggcaagaaatggagaaagatagtccctttcaaggagtttccatcaagtcttccagcagccaacttgcatctggtgatattgatgtgagaatgaatcttgatgatccattaaatcgaaacgttgatactgcgagaaatgttctataagaactaagaacacaaatccaccagaaatatttgatttgtcaaggcttgtgt

SEQ ID NO: 89 - DNA, 165 bp, Glycine max
  unsure (1)..(165): unsure at all n locations; Clone ID: 700548013H1
ancttcgagtnggtgttangcgtgcaatganacaacngggtaangtnccatcatcngttatnctcaagcnacagcangcatctcggtgnncttgcaantgcttggcatgcnatattgactggcaccatgttcantgtgattacaagcncnggactagtccagcag

SEQ ID NO: 90 - DNA, 272 bp, Glycine max
  Clone ID: 700548014H1
ctcatcacttactggaagccttgttgtgagtaagagaaaaggcttcctgcaccgagcacaccaacttgatacctctgattctttctttgcttagaattccacagaatatggagactgttcttttcaatcactccccaccttggaattcaagggtttgagcaaggaggaggaagactcattgctagggcaagtggaaatatggaggtacatgacatgcttcacggactccgtggccttgaactgtcatagagcttcgtatagcggacatacta

SEQ ID NO: 91 - DNA, 206 bp, Glycine max
  unsure (1)..(206): unsure at all n locations; Clone ID: 700548015H1
ggttttagtaaccctgatttcgacgctcttttgtccttcaaaaccgcttcagacacatcccanaagctcaaacatggnacattaacagcactaacccctgttcctggaagggcgtgtcgtgcattcgcgaccgagtctcgcgactcgttctcgaaaacctcgacctagaaggtccattcaccccttaacctctctgactcagcttc

SEQ ID NO: 92 - DNA, 274 bp, Glycine max
  unsure (1)..(274): unsure at all n locations; Clone ID: 700548016H1
cggaactagaagcaaaagattccttggtgatagaactaaattcaagagtgagttccttaactcttgagaacaatgattttaggagtaaatgtgatgtcatcgngaaggaatacaatgtcctaaagctcagtgctgaaaaanggctgctttggactctaaggnnttaagaganaaagatgaggagcttcatcagctaaaggatcagttcgaacttgccctaggtgaagcaagcaaaaaccagcgtcattgttgatttatcccaagaaagagatga

SEQ ID NO: 93 - DNA, 275 bp, Glycine max
  Clone ID: 700548017H1
ctcattttttcagtttatcagtttctcaatcgttagatctcatcttatactcaccggcgagtccatctcgcgccaggtcgacgccgctccggccaccgctccggccaccgcctttggttccctcactttctcgtccttttcttctcagaaatatgccttctcagaaagttgaaacgggtcatcaagacacggtccatgatgttgcaatggattactatggtaagaggctggccacggcttcacagatcacacaattaagataattggggtgagta

SEQ ID NO: 94 - DNA, 272 bp, Glycine max
  Clone ID: 700548018H1
catatctcgagagattagttgaagtgagaagaaaagaaaccttggaaaaaccaaaacagagaaaaaataaggcaaggttgagtgattctcttttgctttaaattttaatactgttttaatttttttatttgttgattctattttgtttttgggtggtgctaaattttgtttctttttggtgttttagacttctagtgtgtagtgcagatgaagaattaggtgattaacccttcttgctctgttattttgatgtttcagcttgttggaagcta

SEQ ID NO: 95 - DNA, 272 bp, Glycine max
  Clone ID: 700548019H1
gaaaatgaagaacaatgccattgtttgcaacattggtcactttgacaatgagatcgacatgcttgggctggagaactaccccggcgtgaagcgcatcaccatcaagccccaaactgacagatgggtcttccctgagacaacaccggtatcattgtcttggctgagggtcgattgatgaacttgggatgcgccactggacaccccagttttgtgatgtcctgctccttcaccaaccaggcatgctcagcttgagttgtggaaggagaagagta

SEQ ID NO: 96 - DNA, 272 bp, Glycine max
  Clone ID: 700548021H1
cacacatacccatctactccttccctcatggctgaacaatcttccaactccatttacgatttcactgtcaaggacatcagtggaaatgatgtgagtctgaatgattacagcgggaaggttctactgattgtgaatgtccctctcaatgtggtttgacacagacaaattacaaagaattgaatgtattgtacgagaagtacaagaatcaaggatttgaaatcttggcatttccgtgcaacatttgctggacaggaaccaggaaacaatgaaga

SEQ ID NO: 97 - DNA, 272 bp, Glycine max
  unsure (1)..(272): unsure at all n locations; Clone ID: 700548022H1
tcaaactggatcggggaagacttacaccatgagtggtccttcaggnnggagggacatcaaaggatatgggaatcaattatctggcacttaatgatctgtttcaaatgtctaatgaaaggaaggacatcataagctatacatttatgttcaaatggttgagatttacaatgaacaagttagagacctacttgcagaggacaaaacagacaacaaattagaaattcggagctgcaatgatgcgggttgagccttcctgacgccatattgcattc

SEQ ID NO: 98 - DNA, 268 bp, Glycine max
  unsure (1)..(268): unsure at all n locations; Clone ID: 700548023H1
ccaacaattgcaatctttacttgaaactctcagtgccactgagccanactacattcgttgtgtaaaacccaataatcttcttaagccatcaatttttgagaataaaaatgttctgctgcaactacgttgtgggggattatggaagcaattaggataagctgtgctgggtatccnactagaaaaacctttgatgaatttgtggatcgntttagccttctttcacctgaagcattgacgnagttctgatgaggtcatgcttgcaagagga

SEQ ID NO: 99 - DNA, 241 bp, Glycine max
  unsure (1)..(241): unsure at all n locations; Clone ID: 700548025H1
cttcacttttaattcgttaggttaccctanccatcactantgcttttctatctatcccccntctcttcttcctctgattccccgtatatttcttctaaatcttctctccttgtcctttttctccctacacctcacgcacacacgcacaattcttcctttctcctcttttgatgtcttaggaaccatccaatctgaatttgtgtatcatggtgattgattttccttcttcctttttgttgtt

SEQ ID NO: 100 - DNA, 270 bp, Glycine max
  unsure (1)..(270): unsure at all n locations; Clone ID: 700548026H1
cnacattagttcttgttattcattattcattctcagcttctttnncttctggggggcaaaaggggtcacttttcagatccgagattgagctcctttacccatcatcatcatggagctcctcgggtacctgaatcagggcacccttctagaggaacaacacttgttattactctttcattggtgctttcgacacttgtgtccttctccactttcacacatgccttctcttcttctgcgttcggaatgaatcctataaaacctaggcactca

SEQ ID NO: 101 - DNA, 269 bp, Glycine max
  Clone ID: 700548027H1
gtttcttacaaggctctactctactgcttcaccttctgctctagaaaattcagtggtgatacatggcttcggctactctctctgtagccaaaccagcccttcaggcaaatgggaaaggcttctctgaattctctggctccgcagctcatcaggcttccttcccttttctagaaaatcttcagaggatttccattctgtcattgccttccagacctatgcagttggaagcagtggaggtcaagaagggtgtgacagaagcaaaactgaag

SEQ ID NO: 102 - DNA, 271 bp, Glycine max
  unsure (1)..(271): unsure at all n locations; Clone ID: 700548028H1
ggcaganagcaagctcatcctagagttttaaaaatggcagcagcctacctccatggctctctcttccccatccttggctggcaaggccgtgaagctgggcncatcagcccccgaagtcgggagggtcagcatgaggaaaccgtcaccaagcaggcctcctccggaagcccatggtacggcccagaccgcgtcaagtacttgggcccattctctggcgagccnccgtcctacctcactgngagttcccaggtgantacggctgggacatgct

SEQ ID NO: 103 - DNA, 269 bp, Glycine max
  unsure (1)..(269): unsure at all n locations; Clone ID: 700548029H1
gtgtcggngatcccctttctccttccttcnctgagagacaatgacaatgacgtgggcgcgattcgattcgtggaagcagnaatactacaccacaagcggcgtggtggtaggttacgcagtatgctccagcctcctgcnatcatcaacaaatacgccatcaccaaattcaactacccaggcctcttaaccgcgctccagtacntcacctccgcactcggcgtctacgtctttgggaataaggtttctcnaccacgngnccttcaccctcc

SEQ ID NO: 104 - DNA, 269 bp, Glycine max
  unsure (1)..(269): unsure at all n locations; Clone ID: 700548030H1
gaagtaacgctagcttcagaagncgntggtntgctttcttcgcancgtgtccgcccgnntcttctccncctcggtttgccactgaatgcagctgatatantttacagaagttgtgaaggaccaacagagcacttagagagtttaactgagagctgcagggatggctcatttggatgtttgtcatcangtcaggttcattggtcagcntgaggnatatggaagtagactttcttccatattccgacggtagaaggatcaaaagataaagt

SEQ ID NO: 105 - DNA, 268 bp, Glycine max
  Clone ID: 700548031H1
ctcctttaaggtccattcataatcttctcagatagaaagagagtgatctattcattctaatcatttggggtgtcagaaacattcacattcacatctgggtctaaagttgtgaattcattaaccttcacctggtgcactaacaaaagtgaccctttggataagaattcaaaagggtatctgaggatctcacaaatttgttgaatttccctgattctatgttgtatagggtgtgcaaggtacagaatcatggtgagtggaaatggctgtt

SEQ ID NO: 106 - DNA, 270 bp, Glycine max
  unsure (1)..(270): unsure at all n locations; Clone ID: 700548032H1
angcggtctctcaccgcacgcactagcactgtctcactctctcaacgcacgcatcatctcaaacttgttcgcacttttncacggatctgatctaactaagttctcgccatgaatcgccaccacgatcccaatcctttcaggaagaagaagtcaatcctttttcgaatggtggtgctgctcctgcatccaaatcacgtattccaccattagcatctcagccactgggctttggtcaaaggcagatgctacagttgatatccttggatatac

SEQ ID NO: 107 - DNA, 274 bp, Glycine max
  unsure (1)..(274): unsure at all n locations; Clone ID: 700548033H1
ccttcttccggatctcaatctatggatatccgcaagangggaagacacgaaaccggcttcagcttaaatggaggattcaagagatccaagcaagaaatggagtccttatcaactggtgtaggaagcaaatcgaagccagtaccaagtttttcagcactgctggttgcccatttggtgagggctgccacttcttgcactatgttcccggtggttataatgcagttgcccatatgatgaattaacacctgcagcacctcctccaccatcaagaaat

SEQ ID NO: 108 - DNA, 270 bp, Glycine max
  unsure (1)..(270): unsure at all n locations; Clone ID: 700548034H1
cntcattctcctcggagctttgctcgttattcttctttttcttntctttttttcgtttcgttcggaaaacgcgtangctgtgccgtcgtttttagtgggtggatgggaacgacgtcgtgtgagtacgtgagctggaggaggtgtttatgtcgaacgacangnggaggagggaggttcattacttgcttaaacgacgaggcggtggctcggatctggccgttttgggaaaagagaagacctcaaacacatgtcgtatcgctacgccattcg

SEQ ID NO: 109 - DNA, 268 bp, Glycine max
  unsure (1)..(268): unsure at all n locations; Clone ID: 700548035H1
tagattgcagccctcagcaaaaancaatggctgaagggagtcatagttatggaaatgctactaatacctcaggcatagaagtaaatgagaaggttatttcaggttcttgggcgcatcaacagatgctatcatccctaatagtaggggcgacccattcaatagatctaatggatggaatgctatcaaatcatccacacccagtaacaattctagtatgaaaattcgtgaaaatgaaagtgttgcagcctcatcatgacaaagctatgca

SEQ ID NO: 110 - DNA, 269 bp, Glycine max
  unsure (1)..(269): unsure at all n locations; Clone ID: 700548036H1
cnaaaatattattaagatgatcaacattattggagcacttgttctactctttgcatttctcntcctcagttgtgtgtatgcacaagacacaacaacccttgtgcntgcaatcataacttttggtgattctgctgtgatgtagggaacaatgactatcttcccacccttttcaaggctgattaccctccttatgggagggactttgttaaccaccaacctactgggaggttttgcaaggcaaattagctactgatttcactgctgacaca

SEQ ID NO: 111 - DNA, 270 bp, Glycine max
  Clone ID: 700548037H1
gcttcggctactctctctgtagccaaaccagcccttcaggcaaatgggaaaggcttctctgaattctctggcctccgaagctcatcaggcttccttcccttttctagaaaatcttcagaggatttccattctgtcatgccttccagacctatgcagttggaagcagtggaggatacaagaagggtgtgacagaagcaaaactgaaggttgccataaacgggtttggaaggattggaagacttcttgaggtgctggcaggtcgcaaagact

SEQ ID NO: 112 - DNA, 269 bp, Glycine max
  unsure (1)..(269): unsure at all n locations; Clone ID: 700548038H1
aacactcataacacaaagcacaaagcaaagctcatccttgagttaaaaaatggcagcagcttcttccatggctctctcatccccatccttggctggcaaggccgtgaagctgggcccatcagccccagaagtgggagggtgagcatgaggaagaccgtcaccaagcaggtctcctcaggaagcccatggtacggcccagaccgagtcaagtacttgggcccattctctggcgagcncgtcctacctaaccggtgagttcccaggcgact

SEQ ID NO: 113 - DNA, 270 bp, Glycine max
  unsure (1)..(270): unsure at all n locations; Clone ID: 700548039H1
cnaagttccaaatttnttggtttggggatagatagagtgatacgcgtcacattttcataatantanaaanatnnnnnnnnnnnnnnnnnnnnnnntgctactcccacctaggattccgaccaccaccaacgttaccgctgctctgctttgccttctctccctcctcgcgtctccaacaccaaaaccactttgttctcaccttccctcaacaactcttcagtgtcccgaaaatcntccgnttcagacnagagnttcttcagaggantcatc

SEQ ID NO: 114 - DNA, 265 bp, Glycine max
  Clone ID: 700548041H1
atagtcggcgacgctttcactctctccggcgacgatgaactcatcgccgacgaaatgagtttgcgccggtttcttctctctcctcgttccgtgagttccttcctctcactccttctccgttctccggtcgccgaaaatttatccggtgttagcgatacggaaaactcatcgcgattccgttttcttcttcgcttcgttttctacttctctttatctttcacttacattacctcttcatcggttgtttccgatcggatccattcgc

SEQ ID NO: 115 - DNA, 267 bp, Glycine max
  unsure (1)..(267): unsure at all n locations; Clone ID: 700548042H1
tcatanatgcttcaggagtacaaggccagttggtggatattttgcagaatcagtcactgatctcagggaattacaggcttttgtacgtatttttggtggttatggcgtagacaggttagacagaatgctaaaaaacacacggctgctcttttaaattgcattgacacttcactacgctcaaaccgagatgtgctagaagcagttgctaccagtctgcatgctggtgatagaatgaaagagaagcttctgtgaagcaaatagttgatc

SEQ ID NO: 116 - DNA, 52 bp, Glycine max
  Clone ID: 700548043H1
gcaaaatcaaaaataacccccgagtcatatatgcatctttttattttatttt

SEQ ID NO: 117 - DNA, 266 bp, Glycine max
  unsure (1)..(266): unsure at all n locations; Clone ID: 700548044H1
gctcgaggtaagagcccatccggtgaaggatctactacttcaactgctccatcaaccaaggccccacagacaagtacagttcctgcttcaacccctccagcgtcagtagttcctcaagcttctgctcctgctctgctcctgctcctgctgcaactggggcactgcctgcatcagttactgcacctatatcttcaccttctcctgctccagccccaactcctgctcctatatctnagaactgctgtggaagggtctgatatctatgg

SEQ ID NO: 118 - DNA, 267 bp, Glycine max
  unsure (1)..(267): unsure at all n locations; Clone ID: 700548046H1
cattgttgtccttgcgttcgtgttgcttttcatcaaaacttgcagaatgtcacaacatagttcgcttccttcctggcttccagggaccccttccttttctacttgaaactggttacgtggaagtgggtgaaactaagcagaggagcacgcagaactcttctattattttatcgagtcagagaacgatcctaaagggaaccctctcctactttggctaaccgggggtcccggttntctgctttctctggccttgtctttgaaataggt

SEQ ID NO: 119 - DNA, 268 bp, Glycine max
  unsure (1)..(268): unsure at all n locations; Clone ID: 700548047H1
tccgtttctgatcctgaatcatcagtttttcccttgaaagangggaggtggcaaggacaaacacaatgaagaagagaaaggagttttctcacatctggctcatggagtagctcaagctgctcatggttaccctcaggggcataccctccacctcctggggcataccctccttaccaagggtacccacctgctcatggctaccctccacaaggtggctatcctccggctggttatcccctgctggctatcctcctgctgctggtggtta

SEQ ID NO: 120 - DNA, 269 bp, Glycine max
  unsure (1)..(269): unsure at all n locations; Clone ID: 700548048H1
cttctcgatttccttctctataacacaacgctctcttctcttgcaaccaaagtacttgtnccagtgtctactcctactcaaaaaggatttgggacatcatgtgcagtgattcgaaaagtaaactttcttccccaacctcgtcgtcatggagaatagtaacattcagaagcagaatctggatggtctctacaactcggttttgcttgaattgtctgcatctgatgattatgaagcttcaaagagaggtggaggaaaaaggcttagatgtg

SEQ ID NO: 121 - DNA, 268 bp, Glycine max
  Clone ID: 700548050H1
ggcaagggaaaaacacaagacggcgcacatagattttgtcgaagaaacatccgaggaacaaggttctgtgcagagcgggactgtgattcaacgggagtagaatgtcttgcgccaccttcaatgttgcagcttcttgaatcttcatggacgtactaagcaagcagtttctaagccatttgggtcaagaaatcactgtactttccctaagttttcttttctctattctgagaccttgattgagctccacttattatagttttggccggga

SEQ ID NO: 122 - DNA, 267 bp, Glycine max
  Clone ID: 700548051H1
gaaatgttgcttcatcacagactggatcaaatccagctaccaatccctcatctgccccaacttgggtttctcctcctaatcctccacagcatccacagaggttatctgaatatgtccgtcggtccttgttttccccagttctgatgctactggaagtccaagcaataatttttcttccttgcgctctggtttttctacatctgaaccaagggcgttatcatctgggagtggggcacccgagatcatcttcatggttggagaggcaag

SEQ ID NO: 123 - DNA, 259 bp, Glycine max
  unsure (1)..(259): unsure at all n locations; Clone ID: 700548052H1
gtaagagcccatccggtgaaggatctactacttcaactgctccatcaaccaaggccccacagacaagtacagttcctgcttcaacccctccagcgtcagtagttcctcaagcttctgcncctgctctgctcctgctcctgctgcaactggggcactgcctgcatcagttactgcacctatatcttcaccttctcctgctccagccccaactcctgctcctatatcttagaatgctgtggaagggtctgatatctatggg

SEQ ID NO: 124 - DNA, 261 bp, Glycine max
  unsure (1)..(261): unsure at all n locations; Clone ID: 700548053H1
cgtggttccaatgcctacacatttacagttgatcaaggcaagacgtanagattccaggatatcaaatgtgggactcacttcttccatcaactttagaatccaagggcataaaatgacaattgttgagtggaagggacccacactctccaaaacatttatgattcacttgatgttcatctagggcagacttactctgtgttggttactgctgatcaaccaccccaagatacctcattgttgtcacaacacgattcacctccc

SEQ ID NO: 125 - DNA, 268 bp, Glycine max
  unsure (1)..(268): unsure at all n locations; Clone ID: 700548054H1
ttttccactccaccaccaaactcctacctttaactgccacacactctctctctccaccctccaactgcaatggccgtcccttccttctccgcgcgttctttttctctccctgcccaaaaccactactgccatcntcttctctcccactaccctccttcactctctcatctcgccgcccaagacattcttcttccaacctcttcacacctcttcgctctcccacaacccccattttgcatcggcccctggcggaggaaccggaggagga

SEQ ID NO: 126 - DNA, 266 bp, Glycine max
  unsure (1)..(266): unsure at all n locations; Clone ID: 700548055H1
ataattaaatctaacgaatttatttcgattgattgtatccatatggggtaataataaaancggggaggagagcttaaaaaaacaagataacaaataaagtataagtgcggggggtcaaactgggtgtatatancggatcactataagacaactctttcttttgaggtttcaaagaatgattttcgaattcgattgaatctaaaacacaaaagaattggtttacaggatagaagacccacgtatatgtgataggatattctatatga

SEQ ID NO: 127 - DNA, 266 bp, Glycine max
  unsure (1)..(266): unsure at all n locations; Clone ID: 700548056H1
cacaacgcggcagagcgaagagaaggggcaaaagagaaagaagcgcttatcgaactcggacggaagcactgagttgactcggagggagtggaaagtgttgttgcgtaatgtctggtggtatcgctcgtggacgctcaccgaggagcgcaagtcgtggcggaagaaccatccccatggttttgttgcgaaccggagacgctgcccgatggaaccgtgaatttgatggtgtggcatgcactatncccgggaagactgggatgattggg

SEQ ID NO: 128 - DNA, 266 bp, Glycine max
  unsure (1)..(266): unsure at all n locations; Clone ID: 700548057H1
tnaacacaccaaccccacatccaaagcttcagttcaatatggcaaccttgtcaagttttgctcctttggccattctaagtttagttctagtaattagtgccattgtctttgaggctgaagctaggccaaggnattctttgtatttggagattcacttgttgataatggaaacaacaattacttggctaccacggcacgtgccgatgctcccccttatgggattgattaccctcaagtcatagaccaactggtcgtttctccaatgg

SEQ ID NO: 129 - DNA, 205 bp, Glycine max
  Clone ID: 700548058H1
cttattcctttctacctctcacacccttctcaatgaccaacaacaacgacaacatcgccgtgacagatctccttccgccctcaatgaagagaatcgcgccgacctagtcaatgctctcaagagcaagattcagagtctggctggggctcattctgatgttctggagactctaccccaatgtcaggaagcgtgttgaatctcttag

SEQ ID NO: 130 - DNA, 267 bp, Glycine max
  unsure (1)..(267): unsure at all n locations; Clone ID: 700548059H1
cnataagctagtttatcgtgaggngaatatgaagttgtttgtttnctttgttgctgcagtagttttggtagcatggccatgccatggcgcaggctaccaaaggttccctctccgaatgaaaactggctatggtagcgttcttcggaggtaaaatgcgcaagttttaggcttgctgtggaagcacacaacatccgagcctttaaaaccattcctgaagagngcgttgaaccaaccagactaaattaatggcgaacnatttagattcgt

SEQ ID NO: 131 - DNA, 265 bp, Glycine max
  unsure (1)..(265): unsure at all n locations; Clone ID: 700548060H1
tggaggggttcatagatttagggaatcgattactatactagtaataaattgtacaaaaaataaaaatataaataatataaatataaaaagaacaaacacaaattttatgtgattagtcgcggtatttaaaaaaaaaatgaaagtagacaaataaaaaaggaaaggagatgtttgantaaaaataattccccttcaagttcttattttttgagaggacaggacaatatgaatgttattatgctctatcaacacattaaaaagatta

SEQ ID NO: 132 - DNA, 268 bp, Glycine max
  Clone ID: 700548062H1
agccagctgaaacagatgatttgaagacaccatgtccttctcagaaagcaggggcttcaagtgtcactactaatcctttaaatggatcttcttcgtatgctaaattgggtagcaagaggttccgaaatagctgtacaaaaagttcatcagctgtaatactatgtccagccataacaaattcatgaattcatctgcagaagaactactttcaggactttattctactgccgttgatgtatgtttccagttgggaataagagttttgatt

SEQ ID NO: 133 - DNA, 268 bp, Glycine max
  unsure (1)..(268): unsure at all n locations; Clone ID: 700548063H1
ggacaattaccttggtgagctcaacagcacaagtgaacaagaaacaaagatacgcagtgaacagtgtttcattcacacctgctgacactcctttgaagctagcagattactttaacattggagggattttccaattggaagcatcccagatagcccttctggtagacccatgtatcttgacacctcagtcatgggtgccgactttcgagccttcgtcgaggtcgtgtttcagaanagaaaacatcatccagagctggcacattgatgg

SEQ ID NO: 134 - DNA, 250 bp, Glycine max
  unsure (1)..(250): unsure at all n locations; Clone ID: 700548064H1
agagtttataagatcttctgaaaccccaagaagaaactgagnccccaaagtaactgcatgangcttagagatgaacccatttaaagaatctacctaccaacctaagagactggaccaaggccttagctttaggtcagttagatgatatgtttgcatcatgttatccgtagcttcaactttctgtaacttcttgtataggcaaaggtttcaaaccttcatctatccttctcttgcttttgccaaaatgtta

SEQ ID NO: 135 - DNA, 269 bp, Glycine max
  unsure (1)..(269): unsure at all n locations; Clone ID: 700548065H1
tgttnttataagtttgattgccaaatcaatatccatggcttcggaggacagaaacgaagaagagcttcacgttctattggtggcattctctgcccaaggtcacatcaaccctttgcttaggcttggcaaaaaatactaagcagaggcctccacgtcaccctcgccaccaccgaattagtttaccaccgcgtcttcaagtcctccgccgccacccccaccgccaccgtccccacttttcaccagcaacggaatccaagtgctattcttct

SEQ ID NO: 136 - DNA, 267 bp, Glycine max
  unsure (1)..(267): unsure at all n locations; Clone ID: 700548066H1
antccaatatattaaagcaaatgaaggtggttattccatttgaagatatagatgagattcaaaggagtgaacttgcattgattaatcctgctataacaattattcttcgcaagggtgctggtggacatggtgccctccttccagtcctttggcaagtgctgatggtagggtcggatatatgtttgcatcattttgggacaggaataaagcattagagaatcttcagcgtgtatcagaatttcaatgaaatgttagaagctgagaagg

SEQ ID NO: 137 - DNA, 268 bp, Glycine max
  Clone ID: 700548067H1
ggtttgggaatgagaagagagtagaaacaaccgagagaaacacatagaaaaaggaggcatagccaacctattcaaaccatgatgcaaggctgtgaggttgatgccattggcataaactacacgatccacacaacaaatcggagcacccttttaaaatcttcagcaacaaatctgcacatcttgacactgaacaagatggtaaagagccagaagaggaagcagaagttgaacaaattgcagtggagtaaggcatgtgctgaagaatgtg

SEQ ID NO: 138 - DNA, 267 bp, Glycine max
  Clone ID: 700548068H1
ccattccgtttcccagatctgctccttccgttccccctcagaaatcagttgaagagcatgggtcgtggagttagcagtggtggtggtcaaagttcattgggttatctttttggcagtggagaggcccctgcccaaaaccagcaacaaataatgccccagcccaacctgaagtgcaggctgtaaataatgtgcctcctccaaaagcatctcctcctactaaaacaatagaccctacaaggctgctggtatcaacagtcattctactga

SEQ ID NO: 139 - DNA, 224 bp, Glycine max
  unsure (1)..(224): unsure at all n locations; Clone ID: 700548069H1
aacaaatacaaacngcatttattganacacgnnngnnnnnngcattcatggngttatgggtacacacaacataatattgcaaganaaggatagttctttcaggtaatccaaaatcacatccttatcgtactctttgcacgtctgcaactctaacaatcattctggagttggcaacaacattaaatatttnctcgtgctgagatgagangctatctttnngccta

SEQ ID NO: 140 - DNA, 265 bp, Glycine max
  unsure (1)..(265): unsure at all n locations; Clone ID: 700548070H1
gaaaatggcggtacccttgctctccaagaggatcgtgaagaagcgcgtcaagaagtttatacgcccccagagtgatcgcaagatctccgtcaagccaagctggcgcagacccaagggtattgattctcgtgnaggagaaagttcaaaggatgcactttgatgcccaacattggttatggctcagacaagaaaacccgccattatctaccaaatggtttcaagaaatttgtcgtcacaatgngaaagacctggaattctcatgatg

SEQ ID NO: 141 - DNA, 264 bp, Glycine max
  unsure (1)..(264): unsure at all n locations; Clone ID: 700548071H1
cnttcccgaaagcgcacagcacccgtcgaaaacccgctcttcaaaactctcgaactcggcgccttgtttggcttatggtacctcttcaacatctacttcaacatctacaacaaacaggtgttgaaggcgttcattatccggtaactgtgactgttgttcagtttgccgttgggactgtgctagtggcatttatgtggggtttgaatctctataagaggccgaaactcagtgggtatgcttggagcgattttgccgctggctgca

SEQ ID NO: 142 - DNA, 267 bp, Glycine max
  Clone ID: 700548072H1
ggaaaatggatgaatcaacgaagaaggggtctgtgacctcactcgcctccctcttcccagtagaggaggcgcaaagggcggccaagcgcgtcgaagacaccattgccgacaagcagagcgagctcgaccgccacgaggtttcgccaccgacaacaacagcctcatcaacctcgtccacaagctccccgaacagctctcccacgacatcatggttccgtttgggaaagcagcgtcttcccaggtcgtttgattcacaccaatgagttc

SEQ ID NO: 143 - DNA, 263 bp, Glycine max
  unsure (1)..(263): unsure at all n locations; Clone ID: 700548073H1
anaatcttcaaagctgatgctgtacttcattttgggacacatggttcccttgaattcatgcctggaaaacnggtggggatgagtgatgtatgttaccctgacagtctgattgggaatattccaaatgtatttactatgctgcaaacaacccttctgaggccaccattgccaagcgcaggagttatgcaaacaccattagctatctgactcctccagcggaaaatgctgggttacaaaggtcttaagcagttaagtgagctcat

SEQ ID NO: 144 - DNA, 265 bp, Glycine max
  unsure (1)..(265): unsure at all n locations; Clone ID: 700548074H1
ccgattggaaacattgggaggccttatgatatggttgactgcaacttttgctgtcatgcagaacnggagagcggagaaccagcaagaattcgcatccaccatggggttactacttagctatgctctgaacatactagtttgcttactggtgtgctgaggcttgcaagtttggctgagaatagtttaaatgcagttgaacggattggcacttacatagatttgccctcggaggtccctctgtcatcgataataatcgccctcctcc

SEQ ID NO: 145 - DNA, 265 bp, Glycine max
  Clone ID: 700548075H1
aattcatggctttagcactttcctccaccgcattgtcaagtcttccaaacagagaaattcgtcaaaagggtttcccagaaagaacacccacatgcttgagcctgaccagaagaacaattgcaaatgctacaaaggagtctcagctgtctgtgaaccacttcctccagatagaccattgtggttccctggtagctcacctcctgagtggcttgatggcagtcttcctggtgattggattcgaccctcttggattagggtctgatcc

SEQ ID NO: 146 - DNA, 247 bp, Glycine max
  unsure (1)..(247): unsure at all n locations; Clone ID: 700548076H1
tgaaattcgaacaatgattttttacactttctttttaatacncnttttggtttagactccctaagaatctgtcgatatttccaattaaatcttcttgttcctgtgaaggtccttaaaaaaaagggctatgccctttctttactcagaagggccttattccaagttccaccaaacaagtttttattcatttgaaacatcttttttttccgaatacagaaaanttcatttcaatttcaattatttctat

SEQ ID NO: 147 - DNA, 262 bp, Glycine max
  unsure (1)..(262): unsure at all n locations; Clone ID: 700548077H1
ccaganttgcagtgcctgacaacctgggtcttcgaatgcgtgggaggaccatggtccggccagctccaccatccaacaaacgagaactatcgtgggtcggcgatgttggttttgttgttgatgcttggtggatgatggatggtgggaaggcattgttgttcaaaaggactcggaatctaattgtcatgtttatttcccaggggaaaaagtggtgtcggtatttggtcctggaattgagagagtctcaagattgggtggggat

SEQ ID NO: 148 - DNA, 264 bp, Glycine max
  unsure (1)..(264): unsure at all n locations; Clone ID: 700548078H1
gcttttaatttcctagatctcccaaacaaattgtagcataagtcccatggccaaagagactagtgttgtttatctatatcccagcaaatcacaagtttggggtgagaattttgatcataaaaaacttgtataacaacactagctgctaatggaaagaaggaggagagtaatggagcacctaatgacacatatcctgcgtttcccgggtggtatgctgatgtttcctggccngagaagcacacacatataaaatagaaaagattc

SEQ ID NO: 149 - DNA, 264 bp, Glycine max
  unsure (1)..(264): unsure at all n locations; Clone ID: 700548079H1
tttttactttcctcacttatactatcagttttctatcaaccctccaacccttctcatcttcctctccacagagaatggttctccgtcgtatcaaagtatcaactatagatcaaggaacaaggaatcataaaattttataatattatttttattttattttccccatttctcttaaaacaaactatatcacatacaacttttttnttctcttttttaaattattatttttcctctatctatcatanagtacttttttcctcnaaa

SEQ ID NO: 150 - DNA, 269 bp, Glycine max
  Clone ID: 700548080H1
caaattacccacacgcaaacgacaacaaccgcgcgcgtttcacacctccataacttcggagtagcatacgcagcgtcgttgactcgcaactcgtaacttggcctcgcgcgccgatggcgtcggtccccagcacgtcgctccccgcaccttcctgccgtcgattcccaagccgagagctcctcttcacgccgcgaaatccgtcgccagcgccgcgcgcaacttcccgagactttcgacaacctcattctctccggaaacaaacgcgcggt

SEQ ID NO: 151 - DNA, 265 bp, Glycine max
  Clone ID: 700548082H1
gccccctccacccctgagcttggtgttggaagggttagcatgaggaaaacagcctccaaaactgtttcctcaggaagcccatggtacggcccagaccgtgtcaagtacttgggcccattctcaggtgagccccatcctatctcactggtgaattcccaggtgactatggttgggacactgctgggctttctgctgacccagagacttttgccaaaaaccgtgaatggaagcatccactccagatgggccatgttggggagcctgg

SEQ ID NO: 152 - DNA, 120 bp, Glycine max
  Clone ID: 700548083H1
tttgctacttcccaggaaacaaatctaaccagtttgtcgacaaaccacttggtttttatgcttatgcaattcttcttgattctgacaatttattttgaaatattatcctgttttcttaaa

SEQ ID NO: 153 - DNA, 263 bp, Glycine max
  unsure (1)..(263): unsure at all n locations; Clone ID: 700548084H1
ctttgttacgaggaggccatggcttgatctttatggagttaacgngagacctgttgcgccagttgggagtgctagtaggaggccttatgtggatcctgcacttatacatcgttccttacctgatgagctgcttttgaggtttttgctcgaatgactccatatgacttcnggagggcatcttgtgtatgtcgaaaatggaagtacacaattcgtaaccctgtattttggcgcagcatgntgaaggcttggcagctatctggaat

SEQ ID NO: 154 - DNA, 263 bp, Glycine max
  Clone ID: 700548085H1
cgagctgaacctgaaacagatgaagtatatgcacagataactttgcttcctgaagcagattcaaagtgaggtgaccagccctgatgatcctctgcctgaatctccgagggtcaagatccattcattttgcagacacttactgcttctgacacaagtacccatgggggtttctctgttcttcgaagacatgcagacgattgtctgcctccactggatatgtctcagcagccacaggcaagaattggttgcaatgatttacatgg

SEQ ID NO: 155 - DNA, 263 bp, Glycine max
  unsure (1)..(263): unsure at all n locations; Clone ID: 700548086H1
ggagaaccttgctgatcaccttgcggacccagtcaacaacaatgcctgggcctacgccaccaacttcgtccccggcaagtgagcatgaaagaaaaggatgacttgtggacttttgagagtttttagatttggtttngcgaagtatatgttattgcaatgtacttcagataatgtgaattatcttgtgtatcccaatccaacttaatgttacttgctttttacaaaaaaaannaaaancaaaaannggangaaaaagagnaaga

SEQ ID NO: 156 - DNA, 264 bp, Glycine max
  unsure (1)..(264): unsure at all n locations; Clone ID: 700548087H1
atcgagataactagaaacagtgtgatgaaaatgaaggtccttgttttcttcgttgctacaattttngtagcatggcaatgccatgcgtacgatatgttccctctccgaatgaacactggctatggtgcccgactccggaggtgaaatgcgcaagttggaggcttgctgtggaagcacacaacatctttggctttgagaccattcctgaagagtgcgttgaagcaacaaaggatacatccatggcgaacaatatagatcagactc

SEQ ID NO: 157 - DNA, 265 bp, Glycine max
  unsure (1)..(265): unsure at all n locations; Clone ID: 700548088H1
ctgaattcattcatagcagcaaacccatctccaacaacatgagttcccaaacacgcancctcaactttgttctgtttcctctgatgtcccagggccacatgatccccatgatggacatagcaaaaattctgcacagaacggtgttactgtcacagtggtcacaacccaccaaaacgcatcacgcttcacatcaactttttctaattcccaaatccgattactcgaagttcattcccataccaagaagcagggttgccagaagggt

SEQ ID NO: 158 - DNA, 265 bp, Glycine max
  unsure (1)..(265): unsure at all n locations; Clone ID: 700548089H1
gccgagccaccgcgttcgccggaccaggcccaggcccatcaccggcccacaaagagatccgctaccgaggcgtccggaaacgcccctggggccgctacgccgccgagatccgcgaccccggcaagaaaacggcgtctggctcggcaccttcgacacagccgaggaagccgctcgagcgtacgacaccgcagcgcgtgagtttcgcggtgcnaaggccaagaccaattttccaaccctcagaactcatccttaacaacaacattcg

SEQ ID NO: 159 - DNA, 263 bp, Glycine max
  Clone ID: 700548090H1
caggggacaaatatgaatacaagtttattaaggagatagttgaattggtgtctagcaagtttaatcgtgatcttttatatgtttcggatgtcctggttgggctagagtcaccggtgctagcagtaaagtccttctggatgttggatctgatgatgttgtccacatggtggggatccatggacttggcggagtgggtaaaacaacacttgctgtcgcagtctataattccatgctcgccattttgaagcctcttactttcttga

SEQ ID NO: 160 - DNA, 262 bp, Glycine max
  Clone ID: 700548092H1
cgccgtgataacacactaacaccaccacttcatcaactttacttgacaacaatattgtaaaactcaaaatctagtttcatactttttttcttcttcttgaaatggctctccaggctgcttctcttgttccgcttctttctcggttcttaaagagggaaagagtggtgtgtctctcaaggactccaccttgttcggtctttcattttcagaacctatcaaagctaacttcatcttctgcattgaggtgcaagagggaattcga

SEQ ID NO: 161 - DNA, 260 bp, Glycine max
  Clone ID: 700548093H1
tacgacccctgggacttacccggattggctacttatggagagaaagagtggtacttcttttcaccacgggaccggaaatacccaaacggttcgaggccgaaccgggcggctggcaccggttactggaagcaaccggggcggataagcccattggtcagcccaaaccggttgggattaaaaaagctttggtgttttacgcagggaaagctcctaaaggggacaaaagcatggatcatgcacgagtatcgtctcgcagacgt

SEQ ID NO: 162 - DNA, 263 bp, Glycine max
  unsure (1)..(263): unsure at all n locations; Clone ID: 700548095H1
gaaagcnnggagttccgtggacggaggaagagcacaagctgtttttggttggattgcagaaggaanggaaaggtgattggagaggaatctccaaaaactacgtcaaaacgcgaacgccaacgcaggttngagccatgctcagaagtactttctccgacgaagcaacctcaatcgccgtcgccgtagatccagcctctttgacatcaccaccgacacggtctctgcaattcatggagggagaacaggtccagaatcaagacacg

SEQ ID NO: 163 - DNA, 263 bp, Glycine max
  Clone ID: 700548096H1
cgttgccattctcatcctcttctttctctctctaccattgccatggatccctacaagcaccggccatccagcgccttcaattctcccttctggactacaaattctggtgctcctatttggaacaacaactctctttaaccgttggagctagaggtccaattctgctggaggattatcatcttgtggagaagcttgcaaattttgatagggaacgtatcccagaacgtgttgcatgccagggcgctagtgcaaagggtttcttt

SEQ ID NO: 164 - DNA, 187 bp, Glycine max
  unsure (1)..(187): unsure at all n locations; Clone ID: 700553501H1
ttcncaattcctaattgtttaaacctnnttctcanttcnncatcgttccgattcttgctccncctaaagatgnagatctcgcgtgaaaactttgaccggtaagaccntcacccttgaggtggnagtcctccgacaccatcgataacgtgaaagctacgattcaagacaaggannggatcccacctgt

SEQ ID NO: 165 - DNA, 279 bp, Glycine max
  Clone ID: 700553502H1
gagggagaagagtgaactcaaagccacagctgctgagaaagtggagcagataacagcttctctgggaacatcatcatctgatggcatcccatcatcagaagcctcagacaggatcaaagctggtttcattcacttcaagaaggagaaatatgacaagaatccagctttgtatggtgaacttgccaaaggccagagccccaagtttatggtgtttgcttgctcagactcaagggtgtgcccatctcatgtgctagatttccaaccaggagaggcctttgt

SEQ ID NO: 166 - DNA, 91 bp, Glycine max
  unsure (1)..(91): unsure at all n locations; Clone ID: 700553503H1
cngctgntggctcnaangtccaacctgctgatgcnntcctatgatgaagctgtccaatgtgnttggaaagccaaagacagatcacagatnt

SEQ ID NO: 167 - DNA, 252 bp, Glycine max
  unsure (1)..(252): unsure at all n locations; Clone ID: 700553504H1
gtagatttagacacccttttggacaaggaagntgtttttanagggaaaggagggaatttnntgtgtgggagggtggaacccggaattcggtttggttggggtagagaggatgaagattcagtgtaacgtgtgtgaggctgcggaggccaaggttctttgttgtgctgatgaggctgggctgtgttgggagtgtgatgagaaggttcatgcggctaacaagcttgccagcaagcaccagagagtgcctctttc

SEQ ID NO: 168 - DNA, 272 bp, Glycine max
  Clone ID: 700553505H1
tttcattgatgtattgaaggatgatatttctatagttaaagagctgcctaaagagttcagctggagcacaagagagtactatggcttggctattcgagaaacccgaatcaaggctgcgcctgtgcatgcatcagcccattggtatctggagaatgttttgcctgttctacagagttatggtattgctgcaatctctccattttctcacagactgagttttgacaacttgcctatggatattcaacacctacgctgtaaagtcaacttccaag

SEQ ID NO: 169 - DNA, 273 bp, Glycine max
  Clone ID: 700553506H1
ctttctttcacatccaatcaacgaaaaatgctggctgttttcgacaaatcggtggcaaagagcccagagggtcttcagagccctcactcaaattccgtctcagccctaaaagacggttttctcgcagagcacttctcttccgttcaccctggttccgtcaccgttaaccttggctcttccggtctcttggcctattctcttcacaaacagaaccccctcctcccaaggctgtttgcagtcgtggatgacattttctgtttgtttcaaggtcat

SEQ ID NO: 170 - DNA, 272 bp, Glycine max
  unsure (1)..(272): unsure at all n locations; Clone ID: 700553507H1
cacaaacctcgttcccttcgctggtgggacagcgaaaccagtttaacaacatgaatatgctagggaacatgtctaatgtgacttccttgctgaatcagtctntcccgaatggaattccaaattcagggcttggnggccctgggagcagccagcgcagtggagggattgatgctggggcagaggcggatccgctatctggtgttggcaatggaatgaattttggcaatcagttgcaatcanatttgatgaaccctggttcatctggtcaaggt

SEQ ID NO: 171 - DNA, 273 bp, Glycine max
  unsure (1)..(273): unsure at all n locations; Clone ID: 700553508H1
tgcatttctatttctaactaattattgtgcttattatncattgttgagaaagaaaagaatggcaaagttaataaaattctttgagttgaacacaggggccaagattccttctgttgggttaggcacttggcaagctgagcctggtgttgtagccaaagctgtcaccacagccattctggttggatacaggcatattgattgtgctcaagcgtataacaatcaagcagagattggttctgctcttaagaagctttttgatgatggtgtggtgaa

SEQ ID NO: 172 - DNA, 275 bp, Glycine max
  Clone ID: 700553509H1
gacagagaagatccgtggacgaaaaaaaactgaaagcaagtgatgacaagtgccttatggaagaaccaaatgactttgtttgttagggtttatagcacggtgttacttcactgaagcagcgtgcattgtgttcgcaggtggcaccaattgatgaggaggctaggaagcattcggagctatgcaaagcatcttcgtatagatggtgtgaaggatactatagctgttgcctctggcaaaggtggtgttggcaagtcaaccactgctgttaatttggc

SEQ ID NO: 173 - DNA, 265 bp, Glycine max
  unsure (1)..(265): unsure at all n locations; Clone ID: 700553510H1
tttcccttcttagctttcattgccaaaccctagtgtggcctagctgttttctcantatgagaaaggcttccactctgcaatgctcactttggcgcttcggtgtttcgctattgctggttgccagcttcatttgtgcttcttctgttatggcaacatctgaagtttcagggaangaagtggataccgatgggaagcttgtaaatgaagagccagcaaaaacaagccttcaaggatatgatgaagaagaaaaatttaaagggctttt

SEQ ID NO: 174 - DNA, 275 bp, Glycine max
  unsure (1)..(275): unsure at all n locations; Clone ID: 700553511H1
gtgagttttgtttatttgaaattaacaagtagcaaagatgtttggnatcatcggaggaaacaagggtcacaagataaaggggaacttggtgattatgcgaaagaatgtgttggatatcaacagcattaccagtgttaagggtgtcatcggaaccggcattaacatcattggaggagtcgtcgacaccgttactgctttggcgtcccacatctccatccagctcattagtgccaccaaggctgatggacatgggaaaggaaaagttggaaaggcta

SEQ ID NO: 175 - DNA, 276 bp, Glycine max
  Clone ID: 700553512H1
tttgccttttactgtaccatacacatttcctataggctcttgcaaagctaaattcaattattgaagccaaagaaaaagagacaagaccaaaggcaggtgtggaaggaagaagaaagctctcatcgatcggtgttcaactttaaacactcaggaagagccacaaaattcttctttctgcagggtgcaaggtacagcttcgatgggaaattgctggggttctccacctcacaacccaaccccaacaactaccggtaaccttagtacaggtacgacggg

SEQ ID NO: 176 - DNA, 275 bp, Glycine max
  Clone ID: 700553513H1
caagaatactcataatataggtagcatatagagctatagttatattgatattgctatttgttaagctcttatttcctcggccatggctaataatgaacgtgatctcttctcggcggagattgtgaatcgtggaattgaaccgtcgggacccaacgctggctcgttgacattctctgtgagggtgaggaggcgcttaccggattttctgcaatcggtgaaccttaagtacgtgaaattgggttaccattatctcataaaccatggcatatacttgt

SEQ ID NO: 177 - DNA, 279 bp, Glycine max
  unsure (1)..(279): unsure at all n locations; Clone ID: 700553514H1
ctccaacaagtgtttctgtaaccatggcatccaccactctatcccctacaaccccttctcagctatgctcaggaaagagtgggattttcagtccctcacaggcacttcttgtgaagccagtgaagaggcagatgatggggaagagcaagggaatgagaattgcatgccaagccaccagcattcctgctgatagagtccctgacatgggcaaaagncagctcatgaatctgcttcttcttggtgccatttcactcccctctgctggaatgcttattccct

SEQ ID NO: 178 - DNA, 180 bp, Glycine max
  Clone ID: 700553518H1
tggggtttcactgttcagtgtaactctcaagccatgtctccgggtcccgttattgacgcagccaccgaccccggcgccgaccaacaaattccctccgtcgacgacgcaatcctcaagaagaaagctcacccccaggaagatgacgctcccattgtcgaggacgtcaaggacgatgacaaa

SEQ ID NO: 179 - DNA, 271 bp, Glycine max
  unsure (1)..(271): unsure at all n locations; Clone ID: 700553520H1
gttgatttcccaattaatgatctggacttatcaacatatgtagcccacgggaatagccagtcttccanccgctatgtgttatatgcaattagttgtcattatggagggttaggaggaggtcactatacagcatttgtccgttatggctatgataaatggtatgattttgatgacagcagggtcgaatctgttagtgaggacatgataaagactcctgctgcctatgttcttttctacaggaaaatttagatgaaaattttagatgcaattg

SEQ ID NO: 180 - DNA, 95 bp, Glycine max
  unsure (1)..(95): unsure at all n locations; Clone ID: 700553521H1
cggttgtgggcgaaagctggctncncagcgntagtgaatcnnaatncgtaagactacgntcaaagacancaaggntattacttctttggtggttc

SEQ ID NO: 181 - DNA, 273 bp, Glycine max
  unsure (1)..(273): unsure at all n locations; Clone ID: 700553522H1
gggaagaagtgagagagaagtaagatgagaagaaagagagtgagtttgaagataagaagtagtaagagacntagcaagaagcttctnccacctnangcttcctatgctctggtagccattgtgctgttnttgtnaggcgttttcttttacnctgtctcctctgcttcatctccgccaaatcacccttctaattctctccccatcaccaaccactcttctctttccacttccacggagcttcctcattccatctcattcacnaaccantccncc

SEQ ID NO: 182 - DNA, 272 bp, Glycine max
  unsure (1)..(272): unsure at all n locations; Clone ID: 700553523H1
cggatcaagagaagcacaatctaggtatagaattggagtctttgctgggagagatgcctatgcatatcattgatttcttaaaagaaaattgttcaaatggtgaagaatgtggagaggacgagttagagattgatattgatgatctaaaggatgatacactgtttgctttacgaaagcttttggatgactttttgctagagaagcaaatgaatgaaacgaaagttgaagtgcgtganatagaggtgttgaatgattctggaccaagcaattcc

SEQ ID NO: 183 - DNA, 271 bp, Glycine max
  unsure (1)..(271): unsure at all n locations; Clone ID: 700553524H1
ttcatatttgtaatttagtaaatcagacttaaaataaacattcagaatctgagttgtccgattttacatctaactgttactaatattctaattgtgtgaatgtgtggaagtatccactgcacttagtaaatcagatttaaaacaacagcattcaaaatctgagtcgtttgatcttcattcaaccgttacaaatgtactaattgcttgaatgtgtgaatnatttttttatgggcaaatgcttgtnagtntgttagtntttgtnagtgagatg

SEQ ID NO: 184 - DNA, 245 bp, Glycine max
  unsure (1)..(245): unsure at all n locations; Clone ID: 700553525H1
tctcttttgtactactagttctgaacatggacgctgttgtactctgagactcaccccttcaccttctgacttcgacttcatcgcttcctgcagcacttgctcactgctccaagctatgtgagtttcaaccgcggaagaagaagaaggtgtgtttcgacgcgcctaggcttgcggtgcggtgtgtgaaagcctcggcgcangaaccggtgatactatcgacgatggagagactcggactgggttca

SEQ ID NO: 185 - DNA, 274 bp, Glycine max
  Clone ID: 700553526H1
gggtgagactatggaagccaatggtggaggaaatgtacttggaggaagtgaaggaccctgaaaacaacatagcttcctcagaaggggctactgatcaagacaatgatataaacccaaataatgttgaataccctccacctccttcttcatcacgatcagaggatcagaagccatctctggttcgaattgactccgagtgtgcatcctccatcatcaacaaccacagtaccccagataacaaaaacgacccaaagggccacgaacagtgctttgg

SEQ ID NO: 186 - DNA, 275 bp, Glycine max
  Clone ID: 700553527H1
ccgtgattcgtgaacacaaacaccatcgccatgggcttcaatattctgagaaccacttccatctccactcctatctcttcctccaaatccaaacccattttctcaactcttcttcgttcttctccttccaccattttccccccaaagtccgttactcccaccactcttttcgtttctgccacccccttcttcactctccatcccaagcttggttttcgtggtgggattgtggccatggccgcacctggctctctccgcaaatccgaggaagagtg

SEQ ID NO: 187 - DNA, 275 bp, Glycine max
  unsure (1)..(275): unsure at all n locations; Clone ID: 700553528H1
cccgggttttgtttatattgtactcaaaaaaatgaaaccatggttgtgcncctctacaatagaattccatgtccttttcataaactacaaacgtaactactttaggttgagggacccagaaaattgtcttccgaacaagtttctacaaatcaacaattttnttcttcagcacaaccaacttganctaggatttcctggacatgaaggaacaaacaacttgagcttctttaactgttcttcagttgggcatagatacctcacaagatgggtttgtt

SEQ ID NO: 188 - DNA, 274 bp, Glycine max
  unsure (1)..(274): unsure at all n locations; Clone ID: 700553529H1
ctggggatctggtttcttatactgctgaagaaggtgtaaggatnctgggagagggaaagttcttggtgtcggatagctttcctggaaatgaaaggacgaaatattgcctcacatccaagattccacttggagtgattttagccattccaccttttaactatcccgtcaatcttgctgtttccaaaattgctcctgcgctgattgctggaaactccattgtgctcaagcctccaactcagggagctgtttctgctcttcatatggttcatgcttt

SEQ ID NO: 189 - DNA, 276 bp, Glycine max
  unsure (1)..(276): unsure at all n locations; Clone ID: 700553530H1
aataatccctttatgctcggttttgggatgttgcaaattttattgtctcaaatcccaaacttccacaagttaacatgcctttcaaccgttgctgctattacctctttttgttatgcattaattggaagcgggctttctctggcagtagttgtctcaggtnaaggagaaacaacccgtgtatttggaaacaaagtagggccaggactatctgaagcagataaaatgtggagggttttcagtgctttgggaaacattgcacttgcttgctcttatgct

SEQ ID NO: 190 - DNA, 278 bp, Glycine max
  Clone ID: 700553531H1
ggtttttgcgttgcgttgcactagcccctgcacagtagtgtggtacgatgatttgattttgataagataggtctgtgctgtggggaaaattggaagcatcgatcggaaaatgcaatcgttatcgttgagtatgagtctgaggagtagtagcttagtgaattttcttttgctgggttcagagacgagagtgagaagcagaaggagtgtcatcgtagcgtgtgcttcagagggagacagtggcagcagtagcacaagctcgtttctctctcggacccaaa

SEQ ID NO: 191 - DNA, 283 bp, Glycine max
  Clone ID: 700553532H1
cacccacgtccacaaagacgccggcagcaaccccacgtggaactaccccgtgaaattctccgtcaacgaatcgctggccaaggagaatcgtttgtctcttgagatcaagctcgtctccgaccgcaccctcggcgacaccgttatcggcaccgtccatgttcctctcagggaactcatggacaatcccggcgacgacggttccttccgccaagtcagttaccaggtgatgaaacagtcagggaaatccaagggatccttgaatttctcctacaaagtaggcgaa

SEQ ID NO: 192 - DNA, 256 bp, Glycine max
  unsure (1)..(256): unsure at all n locations; Clone ID: 700553533H1
ttagccaacacaaccatcatggccacctctgcnattcagcaatcagcattcactggtcaaactgctctgaagcagctcaatgagttcgtccgcaanaccggtggcgccggcaaaggtcgcactaacatgcgccgcaccgtcaagagtgctcctcagagcatttggtatggccctgaccgtcccaagtacttgggtccattctcggagcagattccatcatacctgaccggagaattccctggtgactacggatggg

SEQ ID NO: 193 - DNA, 277 bp, Glycine max
  Clone ID: 700553534H1
gcgttggccatggcaaacatgattgtggcttccaccaaacctctggttccagtctgcaccagttcccgttcccccacacccaaagtccccattctccaaatttcactccccaaagccccaaccttgaaactgaaactcccgatttcaaagccccagatgctgtccctccttggagggatagcaccactggtcttggccagaccctccctcgcagaagaaattgagaaagcagcactctttgacttcaacctcacccttcccataataatggtggagt

SEQ ID NO: 194 - DNA, 272 bp, Glycine max
  unsure (1)..(272): unsure at all n locations; Clone ID: 700553535H1
agtgtatagatttttgttggaggaaagccgtgactttccattgaccagaagccaagcaagaactcagattgttgacaaagttagaagaacactgatgggctggtaatctggttcagtatcaaatgaaaaagcactttccgttcagtttttatgttaaatatcaatttggtttgccgtttgnatatggttaagttagcagggtatctaattaacgacaaacatatacttttagcatgtacatcatcttatgtttcttttatttggctttagtg

SEQ ID NO: 195 - DNA, 273 bp, Glycine max
  unsure (1)..(273): unsure at all n locations; Clone ID: 700553536H1
tgcaacacacattgtcttgtcggcaaaatcttccaccaacaacacacanacatggcaggctcaaacattctttctcactctccttcccttcccaaaacctacagccantccttaaaccaaaacgcgttatcccaaaagcttttttttctgcccctcaaattcaaagccaccacaaaaccacgtgctctcagagcggttctctcgcagaacgctgtcaaaacctcggtggaggacacaaagaacgctcattttcagcactgtttcaccaaatcc

SEQ ID NO: 196 - DNA, 270 bp, Glycine max
  unsure (1)..(270): unsure at all n locations; Clone ID: 700553537H1
cgatctccgagaatacatantgacacaaatcaaccacctctgcgcgaaccacattacccagtganccctaccgcaccaaaacaaaaccctcgcaaaccctaaccctagacatggacggngacgacnannnctcggntncgatgatcgangaaatctacgccaacggtggtggcgacgacggcgacaancggagccgccgcgcgatcatgagcggcgaccaggtcgacatcgaagcgtacgcggacgctgtactcggggcgcaccaagatc

SEQ ID NO: 197 - DNA, 270 bp, Glycine max
  unsure (1)..(270): unsure at all n locations; Clone ID: 700553538H1
acagaaacanaagtggcagtattaggtggcatcaccgaagtgcagggagctgccaacagcgtcgagancaacaanctcgctcgctttgctgtagaggaacaaaacaaaagagagaattcagttctggagtttgtgagggtgattagtgcaaagcagcaagtggttgctggagtgaattactacataacattggaagcnaaagatggtgagattaaaaatgagtataaagcgaaggtttgggagagggaatcccaagagttgctagaattc

SEQ ID NO: 198 - DNA, 271 bp, Glycine max
  Clone ID: 700553539H1
cttggccacgcttctcgctggcacagttaccaaccctttcaacaacggttacttccagggtcccccaacggcgccgttagaggccgtttcggcttgcactggtgttttcggaagtgggtcgtacccgggttatccgggtcgggttctcgtggataaggcaaccggggcgagttacaatgcgcatggtgcgaatggaaggaggtatctcgtgccagcgatgtgggacccgcagacttcgacatgcaagaccctcgtctgaagactgccacgt

SEQ ID NO: 199 - DNA, 175 bp, Glycine max
  Clone ID: 700553540H1
gtgactgctgcaaaggcagacttaaattatattgggttagatggagaaataggctgcatggtgaatggagcagggttagcaatggccacaatggatataattaaattgcatgggggtactcctgccaattttttggatgtaggtggcaatgcctctgaaggccaggtggttgagg

SEQ ID NO: 200 - DNA, 271 bp, Glycine max
  unsure (1)..(271): unsure at all n locations; Clone ID: 700553541H1
gagtttgttgtgagctataagctagtttatcgtgaggagaatatgaagttgtttgtnttctttgttgctgcagtagttttggtagcatgcccatgccatggcgcaggctaccaaaggttccctctccgaatgaaaactggctatggtgagcgttcttcggaggtaaaatgcgcaagttttaggcttgctgtggaagcacacaacatccgagcctttaaaaccattcctgaagagtgcgttgaaccaacaaaggactacattaatggcgaac

SEQ ID NO: 201 - DNA, 273 bp, Glycine max
  Clone ID: 700553542H1
ctaacccttccatcgtagtttccacatttctcctaccgaaaagtcaaaactacccactcacccaggtaggcacaggcagcgatggacgtaggagccggcgacgatcattccccggaagccgtcatatcgcggtggaaattcgcggtgtcgcagcagtaccagcacatgctggacaaaacgacgccgcacgttctccggcggtggatcgggtgcctggtggttgccgccgtgtacgtgctccgcgtgtacttggtccaaggcttctacatcgtc

SEQ ID NO: 202 - DNA, 273 bp, Glycine max
  unsure (1)..(273): unsure at all n locations; Clone ID: 700553543H1
gcattgacaacgctgaaggaccttctttgcaaagacttctctgatctattgcatactggacaatctggttccatcaaatcttccatagaatacctttccaagttgtctgcagatgatggagtctcagcagaaatgaggttgttgatattagaagtttcaagagaattcactcgctggagttgcgactacnatgatgccagtaggaaaatagagtctgccagcaccaacatctcgaaagcagataaactagaaggaaatcttgaagctaacaag

SEQ ID NO: 203 - DNA, 272 bp, Glycine max
  unsure (1)..(272): unsure at all n locations; Clone ID: 700553544H1
cctcaagctgccagagtaaaagtattagccagcggaaatgctactgaaagaaggtttagtgtttggattgggggtagtatattggcatcacttggctccttccagcaaatgtggttctccaaatccgagtatgaagagcatggagcttcatatatccaaaggaagtgtccatgagctgctgttgntacttgtacaagtttattttactgccatttatcaggaagtactatgaacgctgatgtagtgattgtctactaatggatttttatttc

SEQ ID NO: 204 - DNA, 273 bp, Glycine max
  Clone ID: 700553545H1
attgaagttgaagtcttgcccttctctcttcaactccaaacacaagacatcatcatccatggctgcctccgtctccactgtcggagctgtcaacagagctcttttgaacctgaatgggtctggacctggggtttcagctcccagttcatccttctttgggagcagcttgaagaaggttattggctcaagggtccccaacacaaagatttcctctggaagcttcaagattgttgctgtagaagagaagaaagagattgaagagacccagcagac

SEQ ID NO: 205 - DNA, 93 bp, Glycine max
  unsure (1)..(93): unsure at all n locations; Clone ID: 700553546H1
ctgtgagactctcacatncactncaccccttagaaaaagaaaatgcaatncccgataaaggacttgtgcagctgacacacaccaagagagaga

SEQ ID NO: 206 - DNA, 279 bp, Glycine max
  Clone ID: 700553547H1
ccgtgattcgtgaacacaaacaccatcgccatgggcttcaatattctgagaaccacttccatctccactcctatctcttcctccaaatccaaacccattttctcaactcttcttcgttcttctccttccaccattttccccccaaagtccgttactcccaccactcttttcgtttctgccacccccttcttcactctccatcccaagcttggttttcgtggtgggattgtggccatggccgcacctggctctctccgcaaatccgaggaagagtggcgc

SEQ ID NO: 207 - DNA, 282 bp, Glycine max
  unsure (1)..(282): unsure at all n locations; Clone ID: 700553548H1
ctcgagcccaaaacactatagcaatagaaacatttgcttttgaaaaacccctcactcttcatcactacactagctagnccacatacaatgtcgaccaaatttaaggtgtttcgtgaattcacaagcaatgactcattcctaaaccaagttatccctgaaaacatcaccgaattccaagtgactctgtccctcgctagagactacgatggcaacaactcaaccaacggaaagttcattccttactgggacactgaaaaggtcactcccgaagtgataaaaaaa

SEQ ID NO: 208 - DNA, 273 bp, Glycine max
  unsure (1)..(273): unsure at all n locations; Clone ID: 700553550H1
gaaggggtgaagatagggatggcgggcatgtctggatgtagttgccgttggcagtgggcggaggcgaaatccatgggagtgggctgttggttcccttcctcaactaccaaaaggagtttccggcctgtgattgtttctgtttctgctatctccgataataactctcactcttacactagcnncggaagaaagctagaagaagaaggcatcaaagggtcaggaactaccgccagagatcgcaggttgcttagaattcgccaagagaaacgacag

SEQ ID NO: 209 - DNA, 98 bp, Glycine max
  unsure (1)..(98): unsure at all n locations; Clone ID: 700553551H1
cgaaggggtgaagataggnatggcnggcatgtactggtatgtagtgtgcncgtctggcagttggggcggacngcnacaattcncatagggagtnnggc

SEQ ID NO: 210 - DNA, 268 bp, Glycine max
  unsure (1)..(268): unsure at all n locations; Clone ID: 700553552H1
cataactgtnttnctntctttctttcgtccctctgctctaccatcaacgtctctctcttttcgggatacattcctgggatctgctggctttgtttttcaagggcaaaatgacagatacaaagccagatacacccttaacggcatcttcatcgcgaaaccttcctgatttcaagaagtctgttaagttgaagtatgtcaagcttggttatcattacctcatcacccatggaatgtacctttgcctttccccccttgtcgtattgattgc

SEQ ID NO: 211 - DNA, 269 bp, Glycine max
  unsure (1)..(269): unsure at all n locations; Clone ID: 700553553H1
gcttattgcagattaattctatgttgcaatagttcttctagagttacagangcaatccgctctcgatgtctcaatgtgcgaataaatgcaccaagtgaagaacagattgttgaagttttagaattcattggtaagaaggaagggctgcaacttcctcctggttttgctgctcgcattgtggagaaatcaaatcgaaatttaaggagggccatattgtcatttgagacttgtcgtgtccaacagtatcctttcactaacaaacaaacaat

SEQ ID NO: 212 - DNA, 239 bp, Glycine max
  unsure (1)..(239): unsure at all n locations; Clone ID: 700553554H1
aaatatttaangaacttaaatatttaaattaataaaattngncgngttttattcgattttttgaattggnttttttttacagtagctaatgcnagtcaccgaacttagtcaangagctagaatgggttataangatatctatagatatatanagatatatttatctatagatatctttncgaaaaaaaaaangaaantaaccaantaagncgtatcattttatgtatngtagnggggac

SEQ ID NO: 213 - DNA, 269 bp, Glycine max
  Clone ID: 700553555H1
tttattccgcgtctataagctttcttgttttgctattgcttgctccgcaatcataatttcatcatcgaatcaaatcaattttgaaggttcattataatggcggaagagataaccaagaacgacgtcggagtaacctccaaaaccaccagaagcagctccaggttctggcctcgttggattcccacttccaccgatcacatcatcgctgccgagaagcgccttctttccgtcgtcaagactggttatgttcaagagcatgttaacattgg

SEQ ID NO: 214 - DNA, 270 bp, Glycine max
  Clone ID: 700553556H1
cttgaactcaaggagatggctctgggaagaggcagtgcagtggttctactactttgcttcttgctgcttcactctcagatggctcgtgctgccacctacacagttggagattctgggggttggacctttaacactgttgcctggcccaaaggaaagctctttcgggctggtgacacacttgctttcaattatagccctgggactcacaatgtggtggccgtgaacaaggctggatatgatagctgcaagactccaagaggagccaaagtg

SEQ ID NO: 215 - DNA, 272 bp, Glycine max
  Clone ID: 700553557H1
aaatcattacatggtcatagtctacacctaattagccaaacacaccacagcaccaaactagttggctcaattctctttgaatggctttggaggctttgaattcaccaacagcagccaccactcccttccgtggttaccaagaagaggaggaggaggttgaccttcacctacgcgagccttgggccaagagaaaacgctccaaacgacctcgttttgagtcggaggaagagtacttggctctttgcctcatcatgcttgcacaaagcggtaac

SEQ ID NO: 216 - DNA, 268 bp, Glycine max
  unsure (1)..(268): unsure at all n locations; Clone ID: 700553558H1
gagtttgttgtgagctatnagctagtttatcgtgaggagaatatgaagttgtttgtnttctttnttgctgcagtagttttggtagcatgcccatgccatggcgcaggctaccaaaggttccctctccgaatganaactggctatggtgagcgttcttcggaggtaaaatgcgcaagttttaggctgctgtggaagcacacaacatccgagcctttaaaaccattcctgaagagtgcgttgaaccaacaaaggactacattaatggcga

SEQ ID NO: 217 - DNA, 275 bp, Glycine max
  unsure (1)..(275): unsure at all n locations; Clone ID: 700553559H1
ctttggtggccacagcaacaataacaatggcagcctcactacaanctgcagctacctncatgcaacccaccaaggtgggcatggccactacgcaacctcanatctacacaatgcatttctaaggcttttggcttggaacccgctgcagctaaactcatttgctcccttaagcccgatctcaaagatttngctcaaaaatgtgtcgacgccaccaaaattgcaggattcgcccttgccacctcagctctcgttgtttctggagcgagtgcagaagg

SEQ ID NO: 218 - DNA, 273 bp, Glycine max
  Clone ID: 700553560H1
gattatatcacatactcaccatggaggctaagttggccaccaccataatacttattttctccgtaatttggcttatgagggtgaatggcatagacccttgtgcctctcaagcggataattccgacctgaacgtgattcccatctacagcaaatgctcaccgttcaaaccaccaaagtcagactcatcgtgggacaacagaattataaacatggcctcaaaagacccactccgattcaaatacttgtccaccttagtgggccaaaagaccgtgt

SEQ ID NO: 219 - DNA, 276 bp, Glycine max
  unsure (1)..(276): unsure at all n locations; Clone ID: 700553561H1
catcaaccntctntctttgcattctttcttcactttctncccttcttcaaccccaactcatgcatgtccctctctatcttctcccaatgaaatgaaccattaaaaaacccaccaccccaattgcaccaccatcaaccacnatgtcctcctagccaccaaagtccgcaaacccaaaaaccctcatagagttagcnagaaacaccccaaaagattcattttgttttaaagcgcaacttatggcatccattgccaccttcttcaacaagttcctctact

SEQ ID NO: 220 - DNA, 278 bp, Glycine max
  Clone ID: 700553563H1
ggcaaagcaatggcatcgtcactacaagcagcagctactttcatgcaacccaccaagtttttgcagctaaagtctactcaggccatatctaaggcttttggtttggaacctgctggagttaataaggtcacatgctcccttcaggctgatcttaaggacttggctcacaagtgtgttgatgctactcaaaattgcaggctttgcccttgccacctctgctctcgttgtttctggggcaagtgctgaaggagtaccaaagcggctaacctttgacgaaa

SEQ ID NO: 221 - DNA, 275 bp, Glycine max
  Clone ID: 700553564H1
atctcattcccgtccccggcgactgagtagcggtctcttcccaacttcggaactccagtccattccgcatttcaattttctcttcacttggcaaagcccaaaccaaaccctggctgaagaagagaattgactgagaagaagaacacagaaatgggctccgaactgattttcagagggcacgagacccagcccgtggacgacgcgtactcaccaaagccccacaaaccctggctcaccgtgactcgcccgattcactacatgctccgtgagcagcg

SEQ ID NO: 222 - DNA, 276 bp, Glycine max
  unsure (1)..(276): unsure at all n locations; Clone ID: 700553565H1
ccaaggcacactcgaccgataccgtttctttcaccttcaacaagttcaacccagtccaaccaaacattatgctccaaaaagatgctagtatttcatcctctggggtgttacaactcaccaaagttggcagcaacggcgtgcccacctcgggatctctcggtcgtgccctttacgctgccccaatccagatttgggacagcgaaaccggcaaggtagccagctgggctacancctttaaattcaacattttcgcacccaacaaatcaaactcagctg

SEQ ID NO: 223 - DNA, 274 bp, Glycine max
  Clone ID: 700553566H1
gcagaaagcaagctcatcctagagttttaaaaatggcagcagcctcctccatggctctctcttccccatccttggctggcaaggccgtgaagctgggcccatcagcccccgaagtcgggagggtcagcatgaggaagaccgtcaccaagcaggcctcctccggaagcccatggtacggcccagactgcgtcaagtacttgggcccattctctggcgagcccccgtcctacctcactggcgagttcccaggtgactacggctgggacactgctgg

SEQ ID NO: 224 - DNA, 175 bp, Glycine max
  unsure (1)..(175): unsure at all n locations; Clone ID: 700553568H1
ccccccctttttttagtaaganattgtcagaaattcaagaaacccatgaaatttataaanaaggaaaaaaaatagatgtcgnaanaaatttgcaaagagtacaaactaaacaaaaacaaaaaagatccaacaataaagagggttttctttctcttttttcgaaaaacgaaaataa

SEQ ID NO: 225 - DNA, 267 bp, Glycine max
  unsure (1)..(267): unsure at all n locations; Clone ID: 700553569H1
cgaganatggcgatggcaatggcgcttcgcaggctttcatcttcaattgacaagcctctgcgccctctcttcaatgccggttccctctactacaagtcgtctttgcctgatgaagctgtttacgacaaggagcgacccggagttacatggccgaagcagttgaatgctccacttgaggtcgtggatcctgagattgctgatattattgagcttgagaaagctaggcaatggaaggggctagaatgataccgtcagagaatttcacct

SEQ ID NO: 226 - DNA, 268 bp, Glycine max
  unsure (1)..(268): unsure at all n locations; Clone ID: 700553570H1
ctcatcttcctctttttcncaaccaaaaggggttcaattctagctagttctattacatcgtccgcnaccatgaacatggcgatcgtgcttctgttcatggttttcgcagtttcatcagctttagacatgtcaataatatcacatgacaacgctcatgcggatagggccacgaggcgcaccgacgacgaggtgatgtcaatgttcgaggagtggctggtgaaacacgacaaggtgtacaacgcgctcggtgagaaggagaagaggtttc

SEQ ID NO: 227 - DNA, 270 bp, Glycine max
  Clone ID: 700553571H1
tcaagatttcagttccaaacaaaacttatcaaaatctcatatactgattcagttctatacataaccatcgagatttactatcaaaccaaaaattctcaaaatctcttcacctctgtgatgaccatggaatacagaaccttagaactcaacatcatatccgcaaaggacatcaagaacgttaacctcttctccaagatggacgtatacgccgtcgttacgctctccggcgaccctctccaccctcagggcgccaccacccacgtccacaaa

SEQ ID NO: 228 - DNA, 269 bp, Glycine max
  Clone ID: 700553572H1
caaccttaataatttattctgtttgtggtctcactagctagaaacaacatcactacacacaaatggcacatactttatccactaatctggctcttaaccttcccacatcgaggtatgttcgtccctcgagaccaacccaggtgaagcccatgaaggtcatgatgggtgatgcaagagaaaagctagaacatgtccatgtgcctaaacacaacaagcaccaccagcccctccccaaaaacaaagttgctcctaccccacccgtaggttgt

SEQ ID NO: 229 - DNA, 272 bp, Glycine max
  Clone ID: 700553573H1
attgaattctccagagagaagaagaaacttaatcgatcatcacttcacttcactaatacatcatggcagacgagacccagaacaagtatgagagctctgaggttgaggtccaggatcgtggtgtttttgactttctcggtaagaaaaaggatgaagaagacaagcctcatcctcaggaggaggtcatcgccaccgagtttcaaaaagtcactgtctcagaccaaggagagaacaagcacagcctcttagaaaagcttcaccgatctgacagc

SEQ ID NO: 230 - DNA, 269 bp, Glycine max
  unsure (1)..(269): unsure at all n locations; Clone ID: 700553574H1
acttttctctttctctcttcttcatgctcgagtgcttggtctcgctcctttacaaaaaaagctatggaccacaacatctaatctaatctnnnnnnnnnnnnnnnnnctcctcttaattattcttttgattctcaaattcttcttcggttttnttccctttctttttggtttcattgagtatgggttcggtggactgttatccttctcgtacggacgatgctgccgtggtgtctttggattcgctgcctttagggttccgattccgaccc

SEQ ID NO: 231 - DNA, 261 bp, Glycine max
  unsure (1)..(261): unsure at all n locations; Clone ID: 700553575H1
ggnattcctgcccctgacnaacctcaaccacttngtaccatcgctgccgcaccatggggctcagcactcntantgccaatcnctnacacntacatagccatgatgggttctaaaggnctcaccgatgcatcaaagatagccattttgaatgcaaactacatggcaaaacgattggagaattattatcccgttcnttccgtggagtcaatggnncagttgctcangaatncatcattgacctgagaggctttaagaatatgt

SEQ ID NO: 232 - DNA, 240 bp, Glycine max
  Clone ID: 700553577H1
tagggataggatgagatatgatattgcaaagaacaaagttcaggttaatccagagatttgaacggagagttccaacttctaggtcagggaagacttggagaaacgttgaacgaagaaggatgctgaattttattttattttattgtataatagtataatttattccccccttttctctacgggtggatggatgtattttctctagcaagtggacctcaaagtatttgccattgattaagc

SEQ ID NO: 233 - DNA, 177 bp, Glycine max
  unsure (1)..(177): unsure at all n locations; Clone ID: 700553578H1
ttcttctctctctagaatccattttctctctctaaatttttctttctcatttnctctctctttcttatctcggaaaatctttctgagctttcaaacgaactttggaattctccagaaccttctcgtttttccgccgaggatcgcgattccgcagaatcgttctcaatcgtcgcttga

SEQ ID NO: 234 - DNA, 275 bp, Glycine max
  unsure (1)..(275): unsure at all n locations; Clone ID: 700553579H1
gtcaagcttgctctttgtgaagaactcgatgagaggatgcgggatttgagaaatgagcttcagtcatttgaaggtgaagaatatgatgaaagccataagaaaaaggccatagaggctttgaaacggatggagagctggaatctattcagtgacacatatgaggagttccaaaattacacagttgcgcgtgattcttttcttgcacatctaggtgcaacactgtggggntctatgagacatattgtgtcaccttcagttgctgatggtgcctttca

SEQ ID NO: 235 - DNA, 270 bp, Glycine max
  Clone ID: 700553582H1
aacagtctccagaaacacaaacctgagttaagaaaaacaacaaacaactgagcttttgattgaatttttaaccattctcatctgaacatggcttgttcagtgcatctccttcttcttcttacttcacttctggctttgttctttaacccaacatgtgtctatggcaatgatgagcttagaacacttttggacttgaaatctagtttggatccagaagggcactttctgtcctcatggactattgatggcaccccatgtggtggttccttt

SEQ ID NO: 236 - DNA, 270 bp, Glycine max
  Clone ID: 700553583H1
ccaaggcacactcgaccgataccgtttctttcaccttcaacaagttcaacccagtccaaccaaacattatgctccaaaaagatgctagtatttcatcctctggggtgttacaactcaccaaagttggcagcaacggcgtgcccacctcgggatctctcggtcgtgccctttacgctgccccaatccagatttgggacagcgaaaccggcaaggtagccagctgggctacatcctttaaattcaacattttcgcacccaacaaatcaaact

SEQ ID NO: 237 - DNA, 266 bp, Glycine max
  unsure (1)..(266): unsure at all n locations; Clone ID: 700553584H1
cgtgatgttattgcactggctggtgggcctttctacgaggttgaattgggaagatttgatgggctaagatctaaatcttcagatgtaaataggaggctgcctcaggcagagttcaacttgaaccagctgaattcactgtttgcggccaacggcctcacccaaactgaaatgatagctctgtcagntgctcacactgttggattctcccattgcaacaaattcacgaacagagtatacaatttcaagagcaaaagtcgagtggaccc

SEQ ID NO: 238 - DNA, 268 bp, Glycine max
  Clone ID: 700553585H1
cgagcagcgagagagagaaaccctagcaaaaatgccggctggtcacggtttgagatcccgcaccagagattccttctctcgtcccttcaggaagaagggtaccatcgccctcaccacatacctcagaacctaccacgtcggcgattatgtcgacgtcaaggttaacggcgccgtccacaagggaatgcctcacaagttctaccatggccgcaccggtcgcgtctggaatgtcaccaaacgtgctgttggggtcgaagtcaacaagcag

SEQ ID NO: 239 - DNA, 266 bp, Glycine max
  Clone ID: 700553586H1
agtttcgggccaatgaggttctcaatgggaagtacacaagagccacagccaaaagtgttttcctggtacccttcactcttcttctcatcatgctccctctttctctcatgagaagctctcatgaatcaactccagagatatcttctgtaagtgtaagcagcagtttgaacaacaacacagaagtaaaacaatgtaacatcttttctggaagatgggtgcataatcctgaagcaccttactacagcaatgaaacatgccattggata

SEQ ID NO: 240 - DNA, 269 bp, Glycine max
  unsure (1)..(269): unsure at all n locations; Clone ID: 700553588H1
cgcaaaaatggcacctgcaacactgtctctgtctctcctcctcctgttctcactcancatcgccgtaaccgttagatcgagcgactacgactacgattgtgtgtacactgcatacgttagaaccggttcggtgttgaagggcggaacggactctaagatcgggctgaagctgtacgacaagtacggctactacatctacattaaaaacctcgaagcatggggcggcttgatgggcaagggctacgactacttcgagcgcggcaacctcg

SEQ ID NO: 241 - DNA, 260 bp, Glycine max
  Clone ID: 700553589H1
cgtgactgtgtacagtgggcaagtggatctcatttgtgcaaccaaggggactgaagcttggcttaaaaaactcgagtggacagggcttcaaaatttcttggagaaagacagaacccccctctactgtggaagtgacaaaacgaccaaagggttttttaagtcatacaaaaacctacaattctattggatcctggagcgggtcattttgtacctactgaccagccctgcgtagcactggatatggtgggtgcaattacaca

SEQ ID NO: 242 - DNA, 269 bp, Glycine max
  unsure (1)..(269): unsure at all n locations; Clone ID: 700553590H1
gcgagtcagtactgagtagggtttcaaatttccaatcggaatcggaaaaaatgnnnnnnnnnnnnnnnnatcacggccatggacacggacacggcgatttcaggaacaaggtctggagtatgagcggtggcccttactgccgtcccaagcactggaagcgcaacaccgccattgccatggtcggcgtcnttctcatctgcatccccatcgctatgaaatccgctgaactcgagcaacggccacatcaccctgttcgccccatcccttct

SEQ ID NO: 243 - DNA, 271 bp, Glycine max
  Clone ID: 700553592H1
gtgaaagcagagaagtgagatacactaagttatcctcataaatacactctaattaggtggcaagataagtgtctaaccttagtaacattgccacatattgtgttcattttggaattgtgccactaaaattctattcaattcatctatggctgcctcttcttatgctatgcaatcaatcctggcaaaccctttgatccgcatttccagcgggtctagggtgaaccaatttggcgttcctgctttgcacatgagaaggaatgttggcctgaga

SEQ ID NO: 244 - DNA, 274 bp, Glycine max
  unsure (1)..(274): unsure at all n locations; Clone ID: 700553594H1
actgggcattggtcactcactcattcccaagtcctaaaccctctgccaatttgaacggcgaactccctcattcttcttccgcaatctccgttctactatctatctgattagaagatagcgtaaattctaagcaaaatattaccgtgttctttagcgtganccaccttcataaataataannccctatgcaactgcaccatcctcgtgttctcttcaaacctctcatcctctctttctctttctgatcacaatgtcgaccttcggagccgccgcg

SEQ ID NO: 245 - DNA, 275 bp, Glycine max
  Clone ID: 700553595H1
tttttccgtttgttttctttcttctattccttttctttattctctttgttttttccacaactagctacaccaacacaatgcatgatcacagtcatcaataccctcttccttgtttgtattgccacccttatagctatattaggatggttcaaaatctcatagagagatgcatgctctttcacatgagccaagaccagtgcataagggcactggcagaacatgcagggattaagccacttgttactgttacagtgtggaaagagttgcaaaaggag

SEQ ID NO: 246 - DNA, 279 bp, Glycine max
  unsure (1)..(279): unsure at all n locations; Clone ID: 700553596H1
ggaatgatgagaagcagctccaagacatgtatcttagcagaaagtcttttgcttttgattctgatgcccctggtgctggcatgactgagaaaagaaaagtcttcgagatggctctgagcacagcagatgccacattccaaaatcttgattcatcagaaatttccctcactgacgtcagtcattactttnactcagacccgactaatctggtacaaaatctaaggaaagatgggaagaagcctagtgcatacattgctgatacaaccacagccaatgctc

SEQ ID NO: 247 - DNA, 232 bp, Glycine max
  Clone ID: 700553601H1
atctgtgacgagcatcatggcctcgagagcagtgctattgttggctatgtgtgtgcttccggccatggttgtggccattcgcccagcaaagaaccctttttgcgtgaagggtcgcgtctactgtgacccttgccgtgctggttttgagacctcagcaaccacctacattgccggtgctgagattatgttgcaatgcaagagcaggttagcaacgaggttgtgtacaccaaga

SEQ ID NO: 248 - DNA, 294 bp, Glycine max
  Clone ID: 700553602H1
cacatctcttcatttctttctctctctcaggcgttctactgtggaataaagttgattttgaagatgaactgttatggtcttcagcagaacgcctttgcagcctgtgaagagatgagaggccctgtgaattttgttgaacagaaggagcctgtcatttgccctaagccgcgccgagttggggttgtatctaacatgcctatgaggcatttgagatggcatttcaatccacaggctgagggttctgactcaaaagctggggcagagctattagagataatgtttaagaaggagagc

SEQ ID NO: 249 - DNA, 290 bp, Glycine max
  unsure (1)..(290): unsure at all n locations; Clone ID: 700553603H1
gggaactcactctgagggcatgtcatcaaccactcctatctatggcttggcacaatgcttccaagacctttccagcattgattgcnttcagtgctttgcatccagccgcaccaagctccctcgctgcctcccttcggtttcggctcgaatttaccttgatggctgcttccttcgctatgacaactacagtttctacactgaggacactgaccctttgagggacacagtgaactgcacctcacagtatggtgctgtggttggtgatggtgagaagttggtgtttgctgaga

SEQ ID NO: 250 - DNA, 288 bp, Glycine max
  unsure (1)..(288): unsure at all n locations; Clone ID: 700553604H1
gaagctgcttcttagtttctccaaacccaaactttcaccacaggtacgttttnccttnaaactattcaatattcatctaatcctctagcttcatccattcattaaatttatcttcgttcagaccatgatctgtgccttanaccatggaaaattcagttagctgaatctgaatttatgcatgattaacgggaatctaatgttgattgattttgtttgaaattttgtntntnttattcttgtggttatggtttgttggattggctttcattaatgagatgtaaaaactga

SEQ ID NO: 251 - DNA, 289 bp, Glycine max
  unsure (1)..(289): unsure at all n locations; Clone ID: 700553605H1
tgtgaatagaatacgtgattctattcaattcatcatacattaaaatatcatcgttatcatatncattccagcgtcactctgattgagagnnaagaaggtgggagatggagaagccacaaaacggagaagaaaaggaagaaaccacggcctctttctgcggttacgattctcttcaccgtcttctcaaggataatcttaacccccatcacttccaggaagtcagccgtttgcttactgggcttaattgtggaaaagcattgaagcagtttctctcccagaatctgcaatt

SEQ ID NO: 252 - DNA, 84 bp, Glycine max
  unsure (1)..(84): unsure at all n locations; Clone ID: 700553606H1
gttttccagaaggtatgggtttctgctttctgaggccaatgtattgcaggatnccancnnctgcnancacgnntancanccttc

SEQ ID NO: 253 - DNA, 268 bp, Glycine max
  Clone ID: 700553608H1
acaatgtcttgctccaatctgacaatgttggtgtcctcaaaaccttccctttccgacccctcgaacctctccttccgctctgtcctgaacccttttcagctccctacacaaaacccagcttcatgcaccccttcacgctcctcaagcacccaaattcagtgtggtctgagagaactgagaacccgcattgagtctgtgaagaacacgcagaaaatcacggaggcaatgaagcttgttgctgcagccaaagtgagaagagctcaagaag

SEQ ID NO: 254 - DNA, 287 bp, Glycine max
  Clone ID: 700553609H1
ggatgtgaaacgtaagacactattaacaacaactggagagaccataagttacaagattctgattgttgctactggtgctcgggctttgaagctggaagaatttggggtgagtggatcagatgcagaaaatgtatgttatttaagacatatagcagatgcaaataggcttgtagatgttatgcagtcttgtcctgtaggtaatgctgttgtcattggtggtggatacataggcatggagtgtgcagcgtctttagtgatcaataaaataaatgtaacaatggtcttcc

SEQ ID NO: 255 - DNA, 284 bp, Glycine max
  Clone ID: 700553610H1
cttcttgaagcatgatttggaatcggttaacaggagcaagactccttttgtggtggtgcaagggcacaggcccatgtacactaccagccatgaaaatagggatgctgctttaagaggaaagatgcttgagcacttggaacctctgttggtgaataacaatgtgacacttgccctttggggtcatgttcatagatacgagagattttgtccactgaataacttcacttgtggtgttaatgcgggtcacaatgcagggacaaaaaaggatatactgttcacatgtg

SEQ ID NO: 256 - DNA, 277 bp, Glycine max
  unsure (1)..(277): unsure at all n locations; Clone ID: 700553612H1
aaaaacagcacaacgnnncactctnaagccgctcacgttatccacanacactctcaaccctccttaaaccctaaccaatccaaccatggcttcttcttccaccttcactgcaatgtccgcctgcaagctctcctcctccgccgccatctcctccttcccctcccgccgccgctccaacgccgtcgttctgtcgaggcgcancgcgccgccagggtctccgccatggccaaggagttgcacttcaacaaagacggcaccgcaattaagaagctccaga

SEQ ID NO: 257 - DNA, 284 bp, Glycine max
  Clone ID: 700553613H1
ctgttggctgtgagccctgtatcacctcttatggctcctggtgggaaagcacaggttgctgctaaggagcttcttgattcaattttggatgctgttgttcgaatatttgagaatcatgtcattgttggggagcttttggaagcaaaagcaagtcagcatgctgacataaacacgccaaaatcattgccagtagatgtaaattggaaccctgattctgaagcatctcaagtcaccggaggttacagcataggtttctccctgacagtgttacagagtgaatgcca

SEQ ID NO: 258 - DNA, 267 bp, Glycine max
  unsure (1)..(267): unsure at all n locations; Clone ID: 700553614H1
gtttttgaagactattactggcaagaaagagaccctcattgaccttacaatantagaaattttatcaaggcacgcatctgatgagttctaccttgggcagagagatggcggtgactactggacttctgatgccgggccattagaggcctttaagaggtttggaaagnatcttgaagagattgaaaagaagcttatagagaagaacaataatgagacattgagaaaccgctatgggccggctaaaatgccttacactttgctctatcc

SEQ ID NO: 259 - DNA, 285 bp, Glycine max
  Clone ID: 700553615H1
gtcgaacttgtggtgagggaattggaaacggatccgctgttcaattcgggccgtggatctgccctgacagaaaaaggaacggtggagatggaggctagcatcatggatggtccaaaacgacgatgcggcgccgtttcgggtcttaccaccgttaagaacccgatctcgcttgctcgtttggttatggacaaatccccgcattcctacctcgccttctccggcgccgaagaatttgctaggcaacagggtgtggaggttgtggacaacgagtactttatcacacct

SEQ ID NO: 260 - DNA, 186 bp, Glycine max
  Clone ID: 700553616H1
atcaatcttctgagagtgtttggttgaaagtagcaaagatgtttcctttcgggcaaaagggtcaaaagataaaggggactatggtggttatgcagaagaatgtgttggatatcaacagcatcaccagtgttggagggatcgttgaccaaggcttaggcttcataggcagtgcagtcgatgcactta

SEQ ID NO: 261 - DNA, 280 bp, Glycine max
  unsure (1)..(280): unsure at all n locations; Clone ID: 700553617H1
cttttaattttcctctcaagtggagcatnccaggttgttagagcgtccattgagctttcaatnctgtggctggattttgatctctctgagtttaaaatggatccaaaaggaagcttatgtgctacaaggtcctcttccttaacctctcctgggaatggactacaaacaaatttgtcgtcagatcctccctctttctatggggtcaggattgaatcacctttcgaagaattcatccaaccctctcctccaacccaatctgtacttccaggtgaatctaaca

SEQ ID NO: 262 - DNA, 291 bp, Glycine max
  unsure (1)..(291): unsure at all n locations; Clone ID: 700553618H1
gtggtcttnnatttgaaggatctctgccttggaggaactctgggcacctgagcttgtgaaacttgtcaacataaagtccattattttgcggaacaactctttntctgggaccatccctgaaggatttgtacagttaaaagaactggaggttttggatttgggatacaacaacttcagtggacatctacctgctgatctagggagtaatatctcactaacaatccttttgctggataacaatgaatttcttgttggtttatctcccgaaataaatgaactgaggntgctttc

SEQ ID NO: 263 - DNA, 287 bp, Glycine max
  Clone ID: 700553619H1
gatggtactatcgtaccaaaatcttctataaataagacccccagccctgaagtcatatccatgctaaatgatatgtgcaatgatcctaaaaatactgtgttcattgtgagtggaaggggaagagattctttaagtgattggtttacttcatgcaaaatgattggacttgcagccgaacacggatactttctaaggtggagtaaagattctgaatgggaaaccagtcccttgtctcctgatcttgattggaaaaagatgtggaacctgtcatgcattgtatacagagg

SEQ ID NO: 264 - DNA, 287 bp, Glycine max
  unsure (1)..(287): unsure at all n locations; Clone ID: 700553620H1
tttttctctctcccttagtcaaagggattcatcgttcttcttcccaggttatttagaaaagcaaaatggtgaagatttgctgcattggtgctggatatgtggggggtcctactatggcantcattgcacttaagtgcccatccattgaagtcgctgttgttgatatctctaaatcccgcattgcagcctggaacagcgaccagcttcctatctatgaacctggccttgatggtgttgtgaagcaatgccgtggcaagaacctcttcttcagcactgatgttgaaaag

SEQ ID NO: 265 - DNA, 287 bp, Glycine max
  unsure (1)..(287): unsure at all n locations; Clone ID: 700553621H1
ggaacataaggcgggcaagngagtttgtttcttctctcttcaatggaaggcngcgaacaggttctcccttgnnnnnnnnnnnnnnnnnnnnnnnnnntatcccaacgtctctcctcctccgctcgctgatcctgtcggtgcttccgatctcgctgctgctgcctcggacgacgttgttgcggaacctgaaattcacgcgctgatttcagacgaagagcacgatcacgatcacgatcacgagcatgagcatgagcatgaccatgacctcgagcacgatcacgagcatg

SEQ ID NO: 266 - DNA, 286 bp, Glycine max
  Clone ID: 700553622H1
ctcacttcttagttctttgtggctctttccatgatggcctctcctacatctccaagagttctcttcttgagtctctttgtaactctttccatgattttacatttgagttcagccaggaagttgtctgagtcagacccccaattgcagttccaataccacagaggccctctcctcacaggcaaaatctccgtaaacctaatttggtacggtaagttcaaaccttctcagaaagccattgttgctgatttcatcacctctctctcctcttccaaacccctcaccgccc

SEQ ID NO: 267 - DNA, 186 bp, Glycine max
  unsure (1)..(186): unsure at all n locations; Clone ID: 700553623H1
cacgaggacgganggcggcgctgaggggctgtcnccgccgctgngcccgtgcaggtcgccggtgctacgggcggatctgtcggcagcgtgtcaggcgttcacggcggagnnggcggcggaggagtacattgccggagggaaggagaaaggagaggggaaggngggagtgccgctgtttgtnaaact

SEQ ID NO: 268 - DNA, 285 bp, Glycine max
  unsure (1)..(285): unsure at all n locations; Clone ID: 700553625H1
ctttcttgcgaaacagaagggcgaaggggcaaacacaactttttngtttttttgtagagcgagagagaaaaaaatgttggggatcttcagcagttccgtggtgtcgccgccggaggagctggtggctgccggcagcagaacgccgtcgccgaagacgacggcggggaagctgctgaaccggttcgtggagaacaaggcgtcggcggtgtcgctgcaggtgggagaacacgtgcagttggcttacacgcaccacaacgagtcaccgtggcatcccagatcnttgct

SEQ ID NO: 269 - DNA, 82 bp, Glycine max
  unsure (1)..(82): unsure at all n locations; Clone ID: 700553626H1
caaagcagcagtaatgaagcgattattgattagtacaaaanannaaanagnaaggngnttttgggggggccnncgtccaccc

SEQ ID NO: 270 - DNA, 284 bp, Glycine max
  unsure (1)..(284): unsure at all n locations; Clone ID: 700553627H1
ctttataatcttcaaagctcagctttttactttcctcacatttcacccgatnctagttagggttccttacacgatggancggttgaagtgggcgcaactgggtgagaggctgaagaccggtggggcccagatggggcgaatggtgagcggaaaagtgaaggagatgcttcaggcgccgacgccggagtccaagatggtggacgaggccacgctggagaccatggaagaacccaattggggcatgaatctcagaatctgtggcatgatcaacagcgaccagttca

SEQ ID NO: 271 - DNA, 283 bp, Glycine max
  Clone ID: 700553628H1
cgatcggagactttgaaaccctcctttcacccattcatcccaagcattcaacaatgtctccgttatcgaagctctcgttgctgatactgatggtgttcatctcctccgcgatggcctcctccgacgagagagtgagcgaattgctctccctgcaatccagatccaaatcgggcgtaatccggctgaacgaccaatccctcgcccgcttcctcacctccgtgaaaacccctcgcccttattccatcctccttttctttgacgccgcacagctccacgacaagcc

SEQ ID NO: 272 - DNA, 283 bp, Glycine max
  unsure (1)..(283): unsure at all n locations; Clone ID: 700553629H1
cctactctccgctcccaagagcacgcaccaccactattgcacttcttcctcgnnnnnnnnnnnnnnnnnnnnnnnngctaaacccttttttctatctcactaacacaacaatgggagacgagaagaagggcaagcctgctgcttccggcgtgtggtccaccatcaagcctttcgtcaatggtggagcctccggcatgctcgccacctgcgtcattcaacccatcgatatgatcanggtgaggattcaacttgggcaaggatcagctgcgcaggtcattccacc

SEQ ID NO: 273 - DNA, 208 bp, Glycine max
  unsure (1)..(208): unsure at all n locations; Clone ID: 700553630H1
ggctatcgcggtgcatggtggcgctggtgtcgaccctaatctcccactcgagcgccaagaagaagcgaaacaacttctcacgcgctgtctcaatcttggaatctctgctctaaattctaatcttcccgncatagatgtcgtcgaacttgtggtgagggaattggaaacggatccgctgttcaattcgggccgtggatctgccctgaca

SEQ ID NO: 274 - DNA, 284 bp, Glycine max
  Clone ID: 700553631H1
agcaaaagagtggctttttggctgggacatcatctggaaacacaactgtgaatgagttacctgcaagctcatgtttcgtgaagctaacagatatggatgaagagaggtggaatcagtttcttgagaatttccagaggttggtgatcccagcttttgttaattgcaaacgaggaaatgtgagcaagaagcagagacagagacttggaacttcatgccagttttagggggaccataaatgaaatgtgaagtgaactaataaatattagagacttgtacaatgtgtc

SEQ ID NO: 275 - DNA, 97 bp, Glycine max
  unsure (1)..(97): unsure at all n locations; Clone ID: 700553633H1
ctagaacaatctcttaaccctctctcaaactccttcagaatccccctttcccagttncnaacttcatntcantcnnntgaagaaaattgtgctaaag

SEQ ID NO: 276 - DNA, 290 bp, Glycine max
  Clone ID: 700553634H1
atgaattatggtggctgtatgtattgaataatgttaaaatggtgcagagctactatggtgtgtatggaggagcaacagcacagtacccggtttatggaagtggagctgctgctgcagcgttctacccatatctgcagtacggagaagggagtggcggtggcggaactagcggcggctacagttccggacagggttatggtgtgaactaccctcctcaggctcacctctttcagtattctcccattgcttccactgcagccgccacagctggctatgcccagcactatggg

SEQ ID NO: 277 - DNA, 286 bp, Glycine max
  Clone ID: 700553635H1
ttctaggaaggctttggtgagagagagtgtgcgtttgaatagggtatctgcatttaatcttcaatgcccttgttcttgaaggaaaactgctctaattatttttctgaaagtagctttattatatttacatctttgcattttatattccaacaatttttaggcaaacatttttggtcatgcattggctggttgcatgtttgtacatttctttgaggcagtgtttgatttgtgaaattttgatgtttcgttggtagtaagtagtttttaatactataagaactaaata

SEQ ID NO: 278 - DNA, 286 bp, Glycine max
  Clone ID: 700553636H1
gatggtactatcgtaccaaaatcttctataaataagacccccagccctgaagtcatatccatgctaaatgatatgtgcaatgatcctaaaaatactgtgttcattgtgagtggaaggggaagagattctttaagtgattggtttacttcatgcaaaatgattggacttgcagccgaacacggatactttctaaggtggagtaaagattctgaatgggaaaccagtcccttgtctcctgatcttgattggaaaaagattgtggaacctgtcatgcagttgtatacag

SEQ ID NO: 279 - DNA, 282 bp, Glycine max
  Clone ID: 700553638H1
gatggattccttgcttggaattcgagttggagcacggtttcgtgtaccgtgagcacaacaggtcacctggatactatgatggacgctactggaccatgtggaagctgcctatgtttggctgcactgatgcttctcaggtgttgaaggagcttcaagaggctaagactgcataccccaatggcttcatccgtatcattggatttgacaacgttcgccaagtgcagtgcatcagcttcatcgcctacaagcccccaggcttctaagtcatgaaaaatttgcaaa

SEQ ID NO: 280 - DNA, 285 bp, Glycine max
  unsure (1)..(285): unsure at all n locations; Clone ID: 700553639H1
atgaccccccctttttttnaagataattttnnctcaagtgttaaaacttgagagattttgcaatggatatnagaactggtatctaattcgaataagtatcattcttttagggaatcttccaattgattgaccaatncaaatannnnnnnnnnnnnnnnnnnnnnnnnnnnnnnnnnnnnnnnnnnnnnnactaatataggantcttaganagataattagtctattcataagaggagatgagatcatatgananatntaaccgattctnncctttgtttgggcna

SEQ ID NO: 281 - DNA, 283 bp, Glycine max
  Clone ID: 700553640H1
cggcttccaccgcagctatgtcagaaatgcttggaaaccccgtgagcctgagaggcgccaccaggtctgctccatcaccgtctacacctgttactttcaagaccgttgcgcttttctccaagaagaaggcagcaccacctcctccaaagaaaaagcctgctgctgtatcccccgccaatgaggaactcgccaagtggtatggtcctgacagaaggatcttcttgcctgagggtctcttggaccgatcggagatccccgagtacttgaccggagaagtgcctgg

SEQ ID NO: 282 - DNA, 275 bp, Glycine max
  unsure (1)..(275): unsure at all n locations; Clone ID: 700553641H1
cgaactggccggacctgagtttgtatgaagtggccagtgggtttacaaaagtgttgcanatagcggctatcgtggcactatcacgctatagcatagtgggttttaaggaaaatgcaatcgcgatggtgtcgcattgcggactccacgaaaatcgcaatcgtgggcgccttacgcatcatngaatctcattgtgccgtggctgttgcatcgtcggtttccgaaaaggttgaatctggagaganattgcattaacagcatttagggttcatggttca

SEQ ID NO: 283 - DNA, 283 bp, Glycine max
  unsure (1)..(283): unsure at all n locations; Clone ID: 700553643H1
gcttcttcaatccctaatgcgccttctgcgttcaattctcagagctacgttggtctcagagcgccactgaggaccttcaacttttcttctcctcaagctgccaaaattcctcgctcccaacgccttttcgtcgtcagagcctccgattcggagttcgnagccgccgttgtcgccggtaaggttcncccggcgcctcccgtgccgcccagaccggcggctccggttggaacaccggtggttccttcacttccacttcaccggcgtcctcgtcggaaccggaagt

SEQ ID NO: 284 - DNA, 281 bp, Glycine max
  Clone ID: 700553645H1
cttcaatgtttatgtcaatggaaatttggcttatgaagatttggatctctcatacgttacgaattcgctggcttcgccgttctatgcggactttgtggttgatgaaggagatgaggccttgagtgttggtgtaggtccttcgaagagcagcatgccgcatgtcatcgatgggatattgaatgcggttgaggttatgaagttgaacaattctcgcagtagtcttgatggagaggtttgtgctgatttagttatgaagagctggtcgacgaggaataatacag

SEQ ID NO: 285 - DNA, 281 bp, Glycine max
  unsure (1)..(281): unsure at all n locations; Clone ID: 700553647H1
gcaccttatgtggcaaagtctgagaaaaggaaagtggagtacgagaagaacatgagagcctataacaagaaacaggcggaaggtcctactggtggggatgaagaagaatctgagaagtctgtatctgaggtgannnnnnnnnnnnnnnnnnnnnnnngcagtggcgaggaagaggatgacgattagagaatggactgataattgcatttatgtaggttctgatgattttgatcatctgttgtaggtggtctggtcattcctgataaacatatttcttgctt

SEQ ID NO: 286 - DNA, 284 bp, Glycine max
  Clone ID: 700553648H1
gcaaattgtcacaccaaaaaattcttgcttagctctcacaaacaatctttaacaacaatgaaggtcagaataactagactctcatgggatgaaacccatctcttttataatatttcctcttcttcccccaatcaatgcatgcatacacgaattgcattcatgagttttctcagagctttactctgtctagcttgtttccactagctaggacttgtatttaactatttcctaatttcatgttttagatgtagaagtaatttttgagtctaaattaattaacagct

SEQ ID NO: 287 - DNA, 287 bp, Glycine max
  unsure (1)..(287): unsure at all n locations; Clone ID: 700553649H1
caagaatccagctttgtatggtgaacttgccaaaggccagagccccaagtttatggtgtttgcttgctcagactcaagggtgtgcccatctcatgtgctagatttccaaccaggagaggcctttgtggtcagaaatgttgctaacattgtcccaccatatgaccagtcaaaatacgctggaactgggncagcagttgagtatgctgttttgcatcttaaggtgtctgagatgtggtcatggacacagtgcttgtggtggtattaaggggctctgtctttcccatatg

SEQ ID NO: 288 - DNA, 58 bp, Glycine max
  unsure (1)..(58): unsure at all n locations; Clone ID: 700553650H1
gcatagcatggaggagantncgtcttcanttccagcgacggcatcatgctggagnang

SEQ ID NO: 289 - DNA, 278 bp, Glycine max
  unsure (1)..(278): unsure at all n locations; Clone ID: 700553651H1
aaagattgggaagggagaagcatgaaaatcggagacaggaagaagaagaagagcatccccagcgacgaatgaatgggcaattgcggaagcagagaggaatctgccgtagtttccaaggctcaagttgttcagcagcttcaccangcgacgtcgttgggcgccagtgccaggaccgacaagaagcacgctcacaggcacaatctcagcgagtgcgcttcggatctcagcgagtcctgttccacaccgcgcggtaancatagcagcaacacgctgctcta

SEQ ID NO: 290 - DNA, 283 bp, Glycine max
  Clone ID: 700553652H1
gaaatgttgccaacattgtcccaccatatgaccagtcaaaatacgctggaactggggctgcagttgagtatgctgttttgcatcttaaggtgtcggagattgtggtcattggacacagtgcttgtggtggtattaaggggcttctgtctttcccatatgatggaacctactctactgattttattgaggagtgggtcaaaattggcttgcctgcaaaggcaaaggtgaagacacagcatggggatgccccttttgctgagttgtgctcacactgtgagaagga

SEQ ID NO: 291 - DNA, 285 bp, Glycine max
  Clone ID: 700553653H1
caatcaacggttatacccttttctatttgagcatcatcatgtccaccgcagcgcagcccaaggccaagaaaacggcgtcgtccaagaagcccctctcccatcctaccttcgccgcgatgatagcggaggcgatagcgagtctgaaggagagaaccggttcgagccaatacgcgataaccaaattcatcgaaggcaagcacaaggagttgcctccaacctacaagaagcttgttctcgttcatctcaagaagtctgttgctgctggcaagctcgttaaggtcaaaa

SEQ ID NO: 292 - DNA, 282 bp, Glycine max
  Clone ID: 700553654H1
cacactctcatagctgtagcggcgacactaagatcggagaaagaatggcgaaaacgacgtcgttgctgctctttacactgctcctcttcggaaccctagctctcatccaggcgaagaaatcgaaggaggatttgaaggaggtgacccacaaggtttactttgatgttgagattaatggaaaagaagcaggtcgtattgtaatgggtctttatgggaaggctgttccaaaaactgcagaaaacttccgagcactttgcacaggggaaaagggaactggtaaaa

SEQ ID NO: 293 - DNA, 250 bp, Glycine max
  Clone ID: 700553656H1
actctttctagggtttcacttcgcgattgcattctcgccgaggttgccttgatatggattctacaagtcaggcataccaacatcgcccccttaccatcaaattatggcctcctagccagagtactaggctaatgcttgtagagcggatgaccaagaaccttacaactccgtcaattttctctagaaagtatggccttcttagcaaggaagaggctgaggaggatgcgaaacacattgaggatgtagcttt

SEQ ID NO: 294 - DNA, 283 bp, Glycine max
  Clone ID: 700553657H1
ggaagatgaagaaatggaaagtgagagtggaagatgggttcagtgtggtgaatggtggaaaggatgtgatattcagtgaagaggtgagagtgaagaatggagtttgtagggtgagttttggtgaccaggaagaggttggtagtggtaaagaaatgtatcttgcaaagggacttggtgtggagtgttgtggcgatggcataggtggttgtagaggcggcggtggtggtgatcataatcccttgggttctggaggaaatgatggagataggcatgcagtggaaga

SEQ ID NO: 295 - DNA, 281 bp, Glycine max
  Clone ID: 700553658H1
ggttggcctgggtctctctcagacgatcaagtgttggagaaaagcgcgttgtatcagagagccactatgggaaatttgaaggacgtgtgggtggtgggaaactcgggacaccctctgatggagggtgttttggttccttacactcatcagaatcttacttggacgcagcacgcgtttaatcagaaggttggggagattcagagcattgctaaggacgctttcgccaggctcaaagggaggtggtcttgcttgcagaagaggactgaagtcaagcttgagga

SEQ ID NO: 296 - DNA, 281 bp, Glycine max
  unsure (1)..(281): unsure at all n locations; Clone ID: 700553659H1
ctcacaaacaactcttgagaaagaaagaatggctgccaacacattgatgagntctgccatctcagccttcccatctctcctttcctcctcaaaatccagatttgccgcagcagttcctctttccagctttgttgtcaccaatgcctcttcttctcgcttttccatgagtgctgactggatgcctggccagcctagacccccctaccttgatggttcagcacctggtgactttggattcgaccctcttcgtcttggtgaagtaccagagaatcttgagaggt

SEQ ID NO: 297 - DNA, 159 bp, Glycine max
  Clone ID: 700553660H1
ttcatgaggatgattatgtttgattttgttgcatgcatgccacgccaaaagtgctcggtacaatttccactgtcaaaataataagaatgtatttgcgtgatgcaatttgtaccaaaaatttgtggtggttcaacttatagtattgcaaactaatccttc

SEQ ID NO: 298 - DNA, 281 bp, Glycine max
  Clone ID: 700553661H1
tgtcattggaatcttgccctaacattggcaatgaaggtctactagctattgggaagttgtgctccaatctaaggttcatatccatcaaggactgctctggtgttagtgatcagggaattgcaggattgttttcttcaacttctttgtttctaacaaaggtgaagctccaggcactgactgtttcagatctctctctagctgttattggtcattatggcaagtcagttactgatcttgtccttaattgcctcccaaatgtcagtgagagggggttctgggtc

SEQ ID NO: 299 - DNA, 280 bp, Glycine max
  Clone ID: 700553662H1
tttttaacttgttcaataagaagttgcaagttttatttatgttcagcatacatttgctatttatcaacctatgtctgtattttaaatcagatgtagaattgtgcctgtattttagggttgattgatgttttgctgccattgtaatatgtagcttttagttgcacctgtacttggttcttttggggatatctgggagcttgatgtattatatataaaatgtgccatggatagcttatgtggcaatgagagtacagatggctgtaaataactgcatgtagtg

SEQ ID NO: 300 - DNA, 281 bp, Glycine max
  Clone ID: 700553663H1
gaattacatacatacattattcactgaatagaaatctaaaagtctttggatttgggttcggatctgttccaaatttccaatatatttcagagagaggcagaaaaggaagaagtaaaggagatggtgggaccagtgaggcctcagtttgtgctctttggctcttccattgttcagctcagtttttctctccaaggttggggtgctattcttgctcacttgtatgctcgcaaggccgatataattctgcgaggatactctggttggaattcaaggcgtgctgt

SEQ ID NO: 301 - DNA, 187 bp, Glycine max
  unsure (1)..(187): unsure at all n locations; Clone ID: 700553664H1
ggtggcattacttgctggagcaggatancccaaaccggaacagaagcagaagcgaagatgggtggttccgttttcactgcacttcctcgttctcccttcctcttcttctctctcttttcccactctcttcncatccaaattccccancaaanccatcaatgaatncgttcccttcacgcttanctgc

SEQ ID NO: 302 - DNA, 293 bp, Glycine max
  unsure (1)..(293): unsure at all n locations; Clone ID: 700553665H1
tgcgtttgtggttcatatgaatcctgccctgtaagtatcatatcatgggcaaccttancttgacaacatattcctacgatccagtttccaaatggaagcgttttacacaactctctcctcccctgcgtccacgtctgttctcaattttcagggctctgaattgcctagaagaaatctttgtaagaaatctttcacacactatttttgcatcacctacgctgcctaaaccgtttcttcagatttgtggtagacctcagacatgatttatacgtcaacccgactctcttctggag

SEQ ID NO: 303 - DNA, 186 bp, Glycine max
  unsure (1)..(186): unsure at all n locations; Clone ID: 700553666H1
gtttgaagagaaagtcatggacgcaggaaaccggaaactactcactagtatatgagtagcattattaatattaagaataagatcgagggtgatgagggctccacttatatgcccctctcctcttgtatgagagatttgtattggatagcttnaaattgtgttgcgttgttatttctctgtatgagt

SEQ ID NO: 304 - DNA, 288 bp, Glycine max
  unsure (1)..(288): unsure at all n locations; Clone ID: 700553667H1
aagngnttcaagaccggcatggctaatgaagaggaacagacaaaccacctcttcggcatcaaagatctcggtcacaagactctccttcagagtgatgcactctatcagtatatacttgaaaccagtgtctatccaagagagcacgagtgcttgaaagagatacgcaagatgactgcaaaacacccactgaacatcatggcaacaccagcagacgaaggacaacttctgagcatgcttgttaagctcacgaattcaaagaacgccttggaaattggtgtattcatggtt

SEQ ID NO: 305 - DNA, 284 bp, Glycine max
  unsure (1)..(284): unsure at all n locations; Clone ID: 700553669H1
caatttcaatcactactattattactctttcacgcttttgcttctcgatttttaaaccctaannnnnnnnnnnnnnnnnatagataagatagggcaaaaacaaaacaaaacaaaataaaaccctagccaaagaaagaccttgttgagcagcagcagcagagagagagaggcttatggaaggagtaccgcacccaatacccagaactgtcgaagaggttttcaccgattttaagggcagacgcgctggtttgattaaggccctcactactgacgttgaaaagttt

SEQ ID NO: 306 - DNA, 282 bp, Glycine max
  Clone ID: 700553670H1
gggcacgatgaccccaacgtggcactcttcttcttggaaaaggacttgcactacggaacaaagttgaaccttcacttcactcgctacttcacctcaagtgttgatgcctcgttcttgcctcgatcagttgctgattccatacccttttcttcaaacaaggtgaatgaagtgttaaacaagttctccatcaaggaagggtcagatgaggctcaaactgtgaagaacaccatcagtgagtgtgaagtgcctggcattaagggagaggaaaagcgttgcgtgact

SEQ ID NO: 307 - DNA, 283 bp, Glycine max
  Clone ID: 700553673H1
ggttcttcatctgcatgcacacagttgcatagttttggaaaccaagaattcctgaagaagggtagcatcaacaagcagttctgaaaatggagatcaccaatgtcagtgagtatgaggctattgcaaagcagaagttgccaaagatggcgtttgactactacgcatctggtgcagaggaccagtggactctgcaagagaacagaaatgccttttccagaattttgtttcggccacgtattcttattgatgtgagcaagatagacttgacaactactgtcctagg

SEQ ID NO: 308 - DNA, 281 bp, Glycine max
  unsure (1)..(281): unsure at all n locations; Clone ID: 700553675H1
tcttacgggaaatgctttcattcagaacatatatagtttgatatgggagttattcattcattgtncgtgtgttgatttcagaaggaggtagaaagcgagcttttctctttgggaatgaccaagtttaacgtggaagaagaggttagttgagcaacaagttatattaattagtnnnnnnnnnnnnnnnnnnnnnnnnnnnnatcagattgtagaacaattaattcaagggcatgtttacttatgttgtttcaatttttaaattacaaaattttcactttgtt

SEQ ID NO: 309 - DNA, 279 bp, Glycine max
  unsure (1)..(279): unsure at all n locations; Clone ID: 700553676H1
aaattacatagcctcagtaatctgagagagaaacaaaaacaatgaaggtttccattgccaagttccactcccttcccctatgttttttccttctcttggccttcaacacaaaacccctcctagcagcagaaccagagccagtggttgataagcaagggaaccctttggagccaggagtagggtactacntgtggccactttgggctgatgaaggaggcctcacactaggccaaacaaggaacaagacatgccctctttatgttatccgtgacccttcat

SEQ ID NO: 310 - DNA, 279 bp, Glycine max
  Clone ID: 700553677H1
ggttgagggattaaagtaccgttattggtagagatggcttgtagggggtgctgggagtgccttttgaagctgtttaacttcatactgaccctcactggtctggccattgtgggctacggaatctatctttttgttgaattctctaaagcttcggatgatgacaacacgcctgcaatttctcccgtcagtgatgattctgctctgattcaacttggccggcctgtgcttatggccgtgtctctatccaacgacttttttgataacttgccccgtgcctgg

SEQ ID NO: 311 - DNA, 279 bp, Glycine max
  unsure (1)..(279): unsure at all n locations; Clone ID: 700553678H1
ggaaggagcaaagagtcgtctccatttttttgaaatggatcttcttgacatcgactccattgccgctgccataaagggttgctccggcgtaatccacctcgcatgtcctaacatcatcggtcatgtcgaagatcctgagaagcagatactggagccggcgataaaaggaacagttaatgtgttgaagncggcgaaggaagcgggggtggagcgcgtggtggcgacttcgtcgatctcatccattatgccaagccctaactggccagctgataagattaa

SEQ ID NO: 312 - DNA, 280 bp, Glycine max
  unsure (1)..(280): unsure at all n locations; Clone ID: 700553679H1
acctcttccataaacgggtggtgcctctcttccatctccccagccaaaacctctctcaggaaggccacattacgcccttccgtcttcgcaacccttaacactccttcttctccttcctcttcatcttccttcccctctctcattcaagacaggcctgtttttgctgcccctgcccccatcatcaccccnactgtgagagaggatatggcaaaggaatacgagaaagctattgaagaacttcagaaattgttgagggagaagagtgaatcaaagcgacant

SEQ ID NO: 313 - DNA, 280 bp, Glycine max
  unsure (1)..(280): unsure at all n locations; Clone ID: 700553680H1
cataaatttattctagtaatacatttctgggttttgtttgccttgtgtgtatctttctattgacgagaataatggaatgttcccaattctctgttttttttgcttttgtccatttttgtgggaatttgtttagcttctactgaggaacaggaaagggacaggattgccaagctgccaggacaaccancaaatgtgctatttgcacactactcaggctatgtgactgtgaatgaagaagctgggagagcattgttctattggctggttgagacaccagcta

SEQ ID NO: 314 - DNA, 285 bp, Glycine max
  unsure (1)..(285): unsure at all n locations; Clone ID: 700553682H1
agaagagcatcactgaactaacaaagcaaccctatgtcgaaggtggtttgtgtcaccggagccagcggcncccttcggatcatgggtggtcctactcctcctccagcgtggttacaccgtccatgccaccgtccaagatatcaaggatgaaaatgagacgaaacatttggaggaaatggaaggagcaaagagtcatctccatttttttgaaatggatcttcttgacatcgactccattgccgctgccataaagggttgttccggcgtaatccaccttgcatgtcc

SEQ ID NO: 315 - DNA, 282 bp, Glycine max
  Clone ID: 700553684H1
caaagttgttgagatcagttgcaaattatcaagcaatcaatgtcgatactctaagggcccaaaatatggaatcttggccattcttcaaccaggtgacagcagatttaacacctttaaatccaaggaaagtagctgtaaaatttgatactttcaaaattggaggcattatacctattaaagcacctggaagagctcgtggggaactggaaataacatatttggacgaagaactgcggttatcaagaggtgataaaggaaacttgttcatcttgaaaatggtgg

SEQ ID NO: 316 - DNA, 280 bp, Glycine max
  Clone ID: 700553685H1
gatggagggggttgagagcaaagaaagagaagtgatggtggcaaaaccagttgcagtagtaggtgtctgtgatttgcttctgaggctgttggccttcacagttactcttgtcgctgctatagtcattgcggtcgataagcagacaaagcttgttcccatccagctttcagattcttttccacctttgaacgttcctcttactgctaagtggcaccaaatgtctgcctttgtgtactttctggtgaccaatgcaatagcatgcacgtatgcagccatgtct

SEQ ID NO: 317 - DNA, 280 bp, Glycine max
  Clone ID: 700553686H1
cactttatggatatgatgcacctgccaagaagaaaccaccgagcaaaacttgtaactgttggccaaagtggtgctgcctatgttgtggctctagaaagaaaaagaatgccaatagtaagaaggagaaaaagaggaaggtgaagcacagtgaagcatcaaagcagatacatgcacttgaaaatattgaggcggggaatgaaggttagaattttggaccatgtggctgttcttactagtcaaaatacatactttgagaaatttcctcaataatactaaataa

SEQ ID NO: 318 - DNA, 278 bp, Glycine max
  unsure (1)..(278): unsure at all n locations; Clone ID: 700553687H1
ctttgccttctttgcttttctcgggctaacaaaagacgacgccgtnttgacccggcgaccgggaaatggtggagccggtggagcttcgctgcgaggagcagctctcgcttctgtcagattcgagcaatggtgatcggtcgtggcggntgaacttcgacgggtttcagctatcttcanggnacgcggngaagcaagtgaaaccccctcgcggactccacgactgttacggggttctaggtcaagaagataatattgcagagtatatcagcagcaggttg

SEQ ID NO: 319 - DNA, 279 bp, Glycine max
  Clone ID: 700553688H1
gggaagaagaacttagctacaagctaaggaaggatcaaagagaatggctcaagcaatggcatcaatgactagcttacgtggttcctctcaggctgtgttggaaggtagccttggctccacacgcttgaatgtggggagtggaagcagggtggcctcagtcacacgtgcagggttcacagttagagcacagcaacaacaagtgaatggtggtgaggtacaaagtagccgtaggcagtgctttcattgttgctgctggtttgaccatggctcttttgttca

SEQ ID NO: 320 - DNA, 272 bp, Glycine max
  Clone ID: 700553689H1
cgtgactgtgtacagtgggcaagtggatctcatttgtgcaaccaaggggactgaagcttggcttaaaaaactcgagtggacagggcttcaaaatttcttggagaaagacagaacccccctctactgtggaagtgacaaaacgaccaaagggttttttaagtcatacaaaaacctacaattctattggatccttggagcgggtcattttgtacctactgaccagccctgcgtagactgggatatggtgggtgcaattacacaatcaccagcgg

SEQ ID NO: 321 - DNA, 84 bp, Glycine max
  unsure (1)..(84): unsure at all n locations; Clone ID: 700553692H1
gaatgcctacgttcatccagtttttaaggacagcatggancgacgatgatgatgaggnagataaaccncaataatggaacttgg

SEQ ID NO: 322 - DNA, 207 bp, Glycine max
  unsure (1)..(207): unsure at all n locations; Clone ID: 700553693H1
atantgagtatggacttggaaactgaaagtgtgactgtgcgcacaaaacgccaatcgcgaaggaatacaccattgccaagcaaaaataatgatgcatcatctccttctctgtctgatggcattggaaatcatccagagccttaaagcaaaatgagatcatgtacattggactttaggccatattttctcaacagactaggatgatgt

SEQ ID NO: 323 - DNA, 89 bp, Glycine max
  unsure (1)..(89): unsure at all n locations; Clone ID: 700553694H1
gaatggcctacgtttcatcncagtttttagaggacagtcatggtatgacgatgatgatgannncagatatactccagtcntggncttgg

SEQ ID NO: 324 - DNA, 217 bp, Glycine max
  unsure (1)..(217): unsure at all n locations; Clone ID: 700553695H1
gaaatgggtaaggggggaatgtcaattgatgaacatggagaaggcaaagaagagaatatggctgcttggcttgttggaataaactctctcaagattcagcctttcaagcttcctactttgggacctcatgatgtcagagttagaatganggctgttggtatttgtgggagtgatgttcactacctcaagacactgaggtgtgctcactttatagtta

SEQ ID NO: 325 - DNA, 292 bp, Glycine max
  unsure (1)..(292): unsure at all n locations; Clone ID: 700553701H1
attcccanttcctaatngtttaaacctaattctcatttcntcatcgttcgattcttctccncctaaagattnagatcttcgtgaaaacttngaccggtaagaccatcacccttgaggtggagtcctccgacaccatcgataacgtgaaagctagattcaagacaaggaagggntcccacctgaccaacaganacttatctttgcgggtaaacagcttgaggatggtcgaacccttgcngactacaacatccagaaggaatccntctccacctcgtgcntcggctcaggggtg

SEQ ID NO: 326 - DNA, 289 bp, Glycine max
  unsure (1)..(289): unsure at all n locations; Clone ID: 700553702H1
atcctaatcacaaaagcggtgaccatggcaaacatgattatggcttccacaaaacctctggttccagtctgcaccagttcccgttcccccacaccaaaactccccattctccaaatttcactccccaaagccccaaccttgaaactgaantcccaatttcaaagccccagatgctgtccctcctgggncggatagcaccactggtcttggccagaccctccctagcagaagaatttgagaaagcagcactctttgacttcaacctcaccctgcccataataattggtgg

SEQ ID NO: 327 - DNA, 267 bp, Glycine max
  unsure (1)..(267): unsure at all n locations; Clone ID: 700553703H1
caagaaatcaaggccgcgtaccggcgactagccagagtctgacaccccgaantggcggccatcgaccggaaaaattcgtccgctgacgaattcatgaagatccacgccgcgtactctactctttctgatccgacaagcgcgctaactacgatcggagcctattccggcgacaacggccgttgtcgacggcggcggtgttctccggttacacgcgtcggaactgggaaacggatcagtgctggtagtgagtcactgagtcgactcgct

SEQ ID NO: 328 - DNA, 284 bp, Glycine max
  unsure (1)..(284): unsure at all n locations; Clone ID: 700553704H1
gtttaaggtantggttngtancctctgatgctgctagttctatgtccgttcttgctccgttcctcgtcnaatccaaatggtanggcacccttnanccaagagncctaacaaataccttagaaaattcaagagatggccacactcccctacaagacctcatggcaccacaacttcggngaagannagccatganngatctcananaagcnaccctagnnntggatncttcncaacacccccaaagnnccnaccttccgtgccctnttctccnctccactctccnt

SEQ ID NO: 329 - DNA, 283 bp, Glycine max
  Clone ID: 700553705H1
aaaaaagagaagaaatcaattggtgaacttgagcaggaattcctccaagcactgcaagcattctattatgagggaaaggctatcatgtcaaatgaagagtttgataatctcaaggaagaactcatgtgggaaggaagcagcgttgtatgctaagttctgatgagcaaaaattcctggaagcttcgatggcttatgtgtctggaaaaccaattatgagtgacaaagagtttgatgagttgaaactgaggctaaagatagaagggagtgaaattgtagctgaggg

SEQ ID NO: 330 - DNA, 284 bp, Glycine max
  unsure (1)..(284): unsure at all n locations; Clone ID: 700553706H1
gaacaagctgggaagcaaggaattatggtggcgtctcagagtcaaaaccccattgagcaaatccaagcgcgcttcaaggacttggaaactggattccgcctctggctctccaagcagtccctccccgtcgaggccgccgtcgtcacaccaccagcgccgcccagggcgccgccatcggcgccttncatgggcaccctcaccgccgacgcctcctccaccttccccacccctcctcccaacgcctctctcaatccccaagccatggcgtctcttaaacaagcgca

SEQ ID NO: 331 - DNA, 286 bp, Glycine max
  unsure (1)..(286): unsure at all n locations; Clone ID: 700553707H1
agcactcaaaaaacaacaactcatctcatcattattccctttctcactcagcacatngnnnnnnngnnnccaccatcaccaataataatggcatcatcctcatcaaccgtngctttgagaaccatctcctctttctctctgaaacctgccaccacaacaagatcattactcaacactagtacttcatccaccataaccctcttaccctttacatcagcaaactcatttctcnncaaaaccctcaaactcaacacctcttcnccacactctcaccttncactacccc

SEQ ID NO: 332 - DNA, 282 bp, Glycine max
  unsure (1)..(282): unsure at all n locations; Clone ID: 700553708H1
atgccaagcctcatccagacccctacctgaaaggtctcgaagctctgaaggcatcaaaggaccacacatttgtatttgaggattctgtttcagggatcaaagctggagttgcagctgggatgcctgttattggtttagctactcgaacccagaaaatttattgatggaagcaaaacctgcctttctgattaangattatgaggatccaaaattgtgggcagctttggaagaacttgacaaggctaccagtgctcgttcagtttgaattactagtgcaactga

SEQ ID NO: 333 - DNA, 274 bp, Glycine max
  Clone ID: 700553709H1
ctttctctttccaaccctacgtcacagtcagaatgcactgctgaagaagcttacaagtggagccagggacgtgccatttttgcaagtgggagcccatttcctcccgttgagtatgaggggaaagtgtttgtgcctggcaggccaataatgcatacatatttcctggatttggtcttggtttaataatgtctgggaccattcgagtgcatgatgacctgcttctggctgcctctgaggctttggctgcacaagtgagccaagagaactttgataa

SEQ ID NO: 334 - DNA, 280 bp, Glycine max
  Clone ID: 700553710H1
gcatcttgtgttgaaggatatccatgccaccttgaagaaatttggaagcaatataattttctcaaatggcctcttggatccatggagtggtggcggcgttttgcagaatatatctgaaagtgtggtttcacttgtcactgaagaggtgcacaccacatagatttacgttcttcaacaaaaaatgatcctgattggttggtagagcagagggagactgagataaagctgatagaaggttggatcagtgactaccaccagaaaaatgaagctatgtttgata

SEQ ID NO: 335 - DNA, 280 bp, Glycine max
  Clone ID: 700553711H1
tccaacaaccacaatggctctcttgggcgccgcctcctcctccgctcgcatcattccctccgtctcactctcttcctcttctcgctccttcttctcactctcatcctcttcttccaaactccaatgcttgcgctcctctcctcgatttcgcacctctttctcaatcagcgaagagcggaggttcgcgtttcgagtggaggatacggaactgtgtcggcaccgaagtcagttgcgtctgatcctgatcagttgaagagcgccagagaagatatcaaggagc

SEQ ID NO: 336 - DNA, 279 bp, Glycine max
  unsure (1)..(279): unsure at all n locations; Clone ID: 700553712H1
gaactttctttcatgtttgaacgggctattatccatttgggagcaattgagttgcttggagagtgtttttnttcttctagaaaaaagaacaggcccttgcctacaagacccacctgtatgcactgccaaccgtacccggaatacccaacttttgttgttgttcttgacagccttcgctaattacgtnattgcatttgctgcccaaggcgtctgttgtgattgtntttctctttggaacttttttttgtttaagtcatcatggccttgcagaacattggg

SEQ ID NO: 337 - DNA, 106 bp, Glycine max
  unsure (1)..(106): unsure at all n locations; Clone ID: 700553713H1
ttgatttcataagtagttaaaggagaacattagtcttactgtaatncatactatcccccttggaattttgcccttaccaccttagtcttaacacattgttcaagtt

SEQ ID NO: 338 - DNA, 278 bp, Glycine max
  unsure (1)..(278): unsure at all n locations; Clone ID: 700553714H1
tcgaacttgtggtgaggganntggaaccggatccgctgttcaattcgggccgtggatctgccctgacagaaaaaggaacggtggagatggaggctagcatcatggatngtccaaaacgacgatgcggcgccgtttcgggtcttccaccgttaagaacccgatctcgcttgctcgtttggttatggacaaatccccgcaagctacntcacccttctccggcgccgaagaatttgctaggcaacagggtgtggaggttgtggacaacgagtactttatca

SEQ ID NO: 339 - DNA, 280 bp, Glycine max
  unsure (1)..(280): unsure at all n locations; Clone ID: 700553715H1
attcttgatctttctcacaaccagcttaanggctattttcctgatgagtttgggtcattaactggcctaaaagtgctncatattgccggaaataatttttctggttctcttccaactaccattgcagacatgagttcacttgacccctggatatatcagagaatcattttactggtcctctaccaagtaacatgccaaaggggctccaaaactttaatgcttcacaaaatgatctgtctggagttgtcccagaagttcttagaaagtttcccagttcttc

SEQ ID NO: 340 - DNA, 288 bp, Glycine max
  unsure (1)..(288): unsure at all n locations; Clone ID: 700553717H1
caaagattttgctcaaaaatgtgtcgacgccaccaaaattgcaggattcgcccttgccacctcagctctcgttgtttctggagcnagtgcagaaggtgttccaaagaggctaaccttcgacgaaatccagngnaagacatacttggaatgaagggaactggaactgctaatcagtgcccaaccantgaaggtggagtggactcatttgccttcaaggcagggaaatacaaggcccagaagttgtgcctggaaccaacttccttcacggtgaaggcagagggtgtggcc

SEQ ID NO: 341 - DNA, 284 bp, Glycine max
  unsure (1)..(284): unsure at all n locations; Clone ID: 700553718H1
ggaaacttggaatttggaacttgcaagcacagccacagcccatggagaacattccagagtcttcatcgagagggacgaaacgccggcgagacgaagattccgatgccgganacacctcctcactcgaagacgatcttacattcaccgcacgctggtcgcgcttcgaatcatgcgagctcagtttccccacgttcacangtggtgtggtgatgcttgtttccagagttcggttgagccttttatattgaagtcacagttgtacagtattgtgaaggacagaacac

SEQ ID NO: 342 - DNA, 281 bp, Glycine max
  Clone ID: 700553719H1
cgcggggatcattggtgtggacttggccaaggatattctccaggcgaaccctaataactacgcggtggtggtgagcacggagatggtggggtacaactggtaccaggggaaggacaggtctatgcttatcccgaatagcttcttccgcatggggtgttctgctgttctgctttccaaccgtcgaagggactatagccgcgcaaagtaccgtcttgaacacattgttcgcacgcataagggtgccgatgaccgcagcttcaggtgtgtttaccaagaggaag

SEQ ID NO: 343 - DNA, 284 bp, Glycine max
  unsure (1)..(284): unsure at all n locations; Clone ID: 700553721H1
agtntgtatagtgtaggatttgttggtattcgtgataaaaacacctcatcctattcattttgccatgacgggcgaactccagataaaggttttgaaagtaatgagaaattattaattcatccatgttactggcttggtttgaatctaatcgtaatgcacttgctccagaggaagcagaggagataaatgacgaatatgatattaatattatttcagataattcagccattagaaataanacaataggtcaaataactactcatctagatcagataccgataggt

SEQ ID NO: 344 - DNA, 272 bp, Glycine max
  unsure (1)..(272): unsure at all n locations; Clone ID: 700553722H1
ctctctcttagttcaaatttcgaattcggaagcagcaaaactaaagcccaaaaacccataccaagatgctcctccgaagccactgttgctacctcggcataatcgccgggctagcagtgttcctcgcaacgacgtgtncgccgacgcgcaatcctgcaacggcatcctcgtctcatacgcctacaccggcggcctgcggttgccgcccaacgtctccgactcggctaagcagccgtaccggttcgagtcgacggtgacggttctcaacaacg

SEQ ID NO: 345 - DNA, 281 bp, Glycine max
  Clone ID: 700553723H1
atcaatctcaagagacagatcatataattttttttagcaaaatccatgggcagatcttcaagaaaaactggatgctctgaagggtcttgttggtgtgctaaataacatggatgagggtgaaactcacaacaacaatgcaacctcccacccaataattcccatagtcctgctcctatgcctggaaggaatcgctctgttggaaaatataacaacagtggcactcagaagattaaaggtctgagtaaccaaaccggcttcaccgaaggcaacgctaacggagc

SEQ ID NO: 346 - DNA, 281 bp, Glycine max
  unsure (1)..(281): unsure at all n locations; Clone ID: 700553724H1
gcaagtngcgcttccgccatactgactctgcctgctactgagttgtgacttgggcgaagacatgctgagaactctagttgtgaagcgcancttggtcaccactggcactcgcattctcagcacctccgactccagcggcaatttcatcatccccggagcccaactcctccgtggatgcagaaacccgcaagtacgcgggctatgctgccctcctcctcttctgcggcggcgccacctactacacattccccctcccggacgacgccaagcacaagaaggcg

SEQ ID NO: 347 - DNA, 280 bp, Glycine max
  unsure (1)..(280): unsure at all n locations; Clone ID: 700553725H1
gaaaatgttagaaatattcctgttcttaacttgtagctgttcattgcatctgatatccacatttgactgaattctctaggtatgaaggtgcacgtactgcagaagcccttgcggcgtttgtgaacattgaagcaggtacaaatggaagatagcttctgttccatccagtgtggtagttctctctccnnataactttgatgaggttgtcttggatgaaacaaaagatgttctggtggaattctatgcaccatggtgcggtcattgcaaggcccttgcccct

SEQ ID NO: 348 - DNA, 281 bp, Glycine max
  unsure (1)..(281): unsure at all n locations; Clone ID: 700553726H1
ttccttccctccaaaatggaagagaaactaaagtacccctgtntctcttccttgtnaaccctcttcctctgcatctccgccacttccactaacccacacaactcccaaacncaaacccttctcctccataccctccctgancacccacactctcatggcccgaatccgccaccgtagaacccgacccaagaacccaccacatccctctcccttnaccacatagacgcactctccttcaacaaaaccccttcccaactcttccacctgagactcgaacgcga

SEQ ID NO: 349 - DNA, 277 bp, Glycine max
  Clone ID: 700553727H1
gaggagaaagatggaggtctcccttggattcagatgatggatcgttctacccctaccatgagttacaaagcatggcgtagagaaccaaaggatggtcctccccaatatagaagcagcactatttttgaagatgctacccctggatggtgagggacttgttttgggatgacgagttccgaccgagatgggatgacatgcttgcaagctcttcaatcattgaagagtgtcccactactggtactatgaaagtgcagtggatacggaagtttcccttttt

SEQ ID NO: 350 - DNA, 278 bp, Glycine max
  Clone ID: 700553728H1
actatccatacatagccacttcacactcactcactcttgttgccttcatggccaagccagtgtccattgaggtatggaacccaagtggcaaatacagagttgtcagcaccaaaccaatgcctggaactcgttggatcaatcttctcattcaaaatgatgttcgccttgaaatatgtaccgagaagaaaacgattttgtcagttgaagacatcattgctttgattggtgataagtgcgatggagttattggacagttgactgaagactggggagaagag

SEQ ID NO: 351 - DNA, 278 bp, Glycine max
  unsure (1)..(278): unsure at all n locations; Clone ID: 700553729H1
ggntaattagggaaaatgagggagatccttcacgttcagggatggcaatgcgggaaccagattcggttcgaagttctgggaagtggtgtgcnactagcacggcatagatccgacggggaagtacgtcggaaactcagatctacactcgagcgcgtgaacgtgtactacaacgaagcttcctgcgggcggtttgtcccacgcgcagtgctgatggacctggagcccggaaccatggacagngtgcggactgggccgtacgggcanatattccggcccnt

SEQ ID NO: 352 - DNA, 281 bp, Glycine max
  unsure (1)..(281): unsure at all n locations; Clone ID: 700553730H1
gatccttcttcagaaatcaaaatccttcttcgttaaggaagacccagaagcagaggggtttgattctgatcgaaacccgcgccatggccatgttcgattccatcttcaacaaaggtnttaaggctgccaaatgtaaaacattgctgaagctgacaattccgcgtataaagctgctaagaaacagnncgagagattcagttgaagaacatgcggcgtgagattgccaagctacttgagactggacaagnangccacagctcgaattagggtagaacatataa

SEQ ID NO: 353 - DNA, 281 bp, Glycine max
  unsure (1)..(281): unsure at all n locations; Clone ID: 700553731H1
ttctgcgaanagggttatccaaaacagagacccttctgggaatgaacatcaacatgttcacgcggngtagntgttgctggctgctggtggtnttctcggcgttngctcggcncggtcnatntcngtcgaagtgcttcgaccgagcacancttcccccggcggnacaactctgccaccccggaggncnagagcangatngcagagtcgtntggcttcggtancctcgactccctcgtggacgccaccgtgcctaantcgatacgccttaaggatatgaagtt

SEQ ID NO: 354 - DNA, 284 bp, Glycine max
  unsure (1)..(284): unsure at all n locations; Clone ID: 700553732H1
aaagaatggcagcttgcactgtctactcaacacaatctctgagcacaaattgctccatctcaaccccatcaaagacgcaactcagttttttccaccaaaagcaggtagttttctggaggaacagcaagaagggcagctgcagcagagaagaagctatgtgataacatgtgcagcaggtgactcncagacagtggtgattggcctggctgcagactcagggtgtgggaagagcaccttcatgaggaggctgaccagtgtgtttggaggagcagcagagcccacca

SEQ ID NO: 355 - DNA, 285 bp, Glycine max
  unsure (1)..(285): unsure at all n locations; Clone ID: 700553733H1
actttcttgatgattttaacactaagaatgggggtcagcgtatagcaacagtgctgatgtaccttactgatgttgaagaagggggtgagacagtgtttccagctgccaaagggaattttagttctgtnccatggtggaatgagcttctgagtgtggaaaaaaaggactttcgattaaaccaangaggggtgatgctctacttttttggagtatgaagccagatgcaagtttagatccatcaagcttacatggtggttgtccagtgatcaagggtaataaatggcc

SEQ ID NO: 356 - DNA, 282 bp, Glycine max
  unsure (1)..(282): unsure at all n locations; Clone ID: 700553734H1
cttccttctactagcaaagcaaaaaaaaataanaannatagagaaatgcaggggggtgtgaaggagaagttgttgatcaaagagaaaaaaacatcagaacaagaagaagaggaattatcattggtgaanagggtgtggaatgangcaaggtgatgtgggtagtggcagcaccagncattttaacaaggttctccacctttggtatcaatgttataagccaagcatttattggtcatattggttcaagggaacttgctgcttatgctcttgtgtncactgttc

SEQ ID NO: 357 - DNA, 279 bp, Glycine max
  unsure (1)..(279): unsure at all n locations; Clone ID: 700553735H1
ttagtaacatagcctctaacagaanaacaagtagtcatcanatgcccacagnaatgacagagtcagggccaagtgtgagtttgaagcttcttgctttagtagctattctagtcgtcttctcgctggtgattctgcttctgattnctncctctgcttccnaggtagccgtagctnnaagaagcggaacctggcnancaagcacagcncaggtancatcnctctggtttcgaaggngatcaccatggtcatggnctcggntctnancnctgncaccncggt

SEQ ID NO: 358 - DNA, 279 bp, Glycine max
  unsure (1)..(279): unsure at all n locations; Clone ID: 700553736H1
ggttaattagggaaaatgagggagatccttcacgttcagggagggcaatgcgggaaccagatcggttcgaagttctgggaagtggtgtgcgacgagcanggcatagatccgacggggaagtacgtcggaaactcagatctacactcgagcgcgtgaacgtgtactacaacgaagcttcctgcacgcggtttgtcccacgcgcagtgctgatggacctggagcccggaaccatggacagcgtncggactgggccgtacgggcagatattccggcccgaca

SEQ ID NO: 359 - DNA, 278 bp, Glycine max
  unsure (1)..(278): unsure at all n locations; Clone ID: 700553737H1
atattcttcttttcttcagaaggaccacttcactttcaganacccagtttcgcatctgggtntttgtttgttgaagtgccaattttnaagattaanataaaataactatgacttggnaaancagaggagaattgcnttctanagcgttatctcgcagagatgggnnctgnntctctgcttaggangtttctgtgctggaatgctcttcactacaaggatatggactatacctgaaaanaacaanggactagcacggccancagcctcagaagctgaat

SEQ ID NO: 360 - DNA, 284 bp, Glycine max
  unsure (1)..(284): unsure at all n locations; Clone ID: 700553738H1
acgaantccgaagcntngttnncggcaaancaaatctgtcatagcgatggcgcctacgaagctacttgcgtatttgcgcttncagtaactcctgattttngccatgcgttggggccgaagccgatgtgtccgtcganggancnactcagancctgatacntccgcnatcaagatccanttagatcaactcaattccaagatccanattctcgagtctcanatcagtgaaaagttggaagaagtgaanaagaaggacaaaattatagcaganaaagaaaattcca

SEQ ID NO: 361 - DNA, 168 bp, Glycine max
  unsure (1)..(168): unsure at all n locations; Clone ID: 700553739H1
tcgcatcgcaccttcaacttaaccnattccactngtaatcgtaaangctntgctagangnnnngacaaagtgtgtctgtgtgtgtgagagaganagcaatggctggctcgtgggcangccgttctctgantntnctagcnancatnnccttcggatgtctattngcga

SEQ ID NO: 362 - DNA, 94 bp, Glycine max
  unsure (1)..(94): unsure at all n locations; Clone ID: 700553740H1
actactaccctcttcatagttgagcngctntntccattggtctnggncganggtagaggatgggctgatcataattcaagnnaggtctgtgnac

SEQ ID NO: 363 - DNA, 281 bp, Glycine max
  unsure (1)..(281): unsure at all n locations; Clone ID: 700553741H1
ggtccttgcaggagataatagcaataganagattagttataataatcaagttgatcttgatcanttcaaccctatcaacaacacctgtttctgttagttatgaacctcccccaacccatcaagtgcaagcncctcctagaaagttggcttccctgacaccgacactgacaccctacacgccaccaagaagagtttccctttcatgagagcaatgagagcttctgagaacaagagtgatccctgtggggggaggtacatttatgtgcatgaccttccctcca

SEQ ID NO: 364 - DNA, 277 bp, Glycine max
  unsure (1)..(277): unsure at all n locations; Clone ID: 700553742H1
ttttcacgagagaacaaacaaggccttcttcttcaccttttcacattgtgttgcatcatcaccatccatttccattgttagctcctcttaatggttatggcaactgtggggtctgaacctgcttgtgcaagaacggttcagatgttgcatcttctttcagctctaaatggcagcactcttcncncggttaagaagcagccacgtgctcgaattcttcaatgttctctcaggattagagcttgtagttccatggctaacaaaaaggatatctacaaac

SEQ ID NO: 365 - DNA, 273 bp, Glycine max
  unsure (1)..(273): unsure at all n locations; Clone ID: 700553743H1
tgaatcgcgtcgtattttggagttggttgaagggttggattggagatttgggaagaaggtacagaacgagaacgtgggtctgcaaatgcagttgttggaggtttattggttgtgtctaacaactcatatttaatttagggtgtgtgtctttctctcctagagcctagtgaagtagaagagatgancgtgaaaaatgatgttcctgggaaagaggtaaacgtgctgaagggtcacgagggtngtgtgttagccgcgaggttcaacaccgacggc

SEQ ID NO: 366 - DNA, 275 bp, Glycine max
  Clone ID: 700553745H1
tgctgaaggagaaaagagtgcaaatttgagaagtagaagagggaggtcttgttcaattttaccgcatgctagtgctaagatggcatgtgatcaaacacacagattgatctctactaacttagatgaagtgagtcaaggtaaagtacacacaatagaggagtagctaatgattctcctcgcatccttaatgttcatgatgtgtatgaagttccacaaactagtgaaaatcatgaagtcagtgaacatgggggaaaaaggtttgagaaatggagttc

SEQ ID NO: 367 - DNA, 180 bp, Glycine max
  Clone ID: 700553746H1
gttgtgaaataaaaatggctgcgaaagagtaggttgcagagaaaatgtgtatgtatagggatggatttggagaccataattcagggttgcatagacagtagtgacactttctgttgctgctgcatgtttgtggagtttatgttattgtctctcttatatcatactttttttttttgcttt

SEQ ID NO: 368 - DNA, 102 bp, Glycine max
  unsure (1)..(102): unsure at all n locations; Clone ID: 700553747H1
caacgttaacagtgagtgtggtatgtnccacgccctctcccaatncctgtccnccagcacatccncncaaangcgccngcgcgacnannncatgaccanatt

SEQ ID NO: 369 - DNA, 280 bp, Glycine max
  unsure (1)..(280): unsure at all n locations; Clone ID: 700553748H1
taatagtaatatacataagtaacataaccaatggaagcgcgtgcaggagccaatcagcgtattgcaagaatctctgactcatcttcagcctccaaatttccaggaagggagtgatgttcttcttaagagtgctgagtgcaganaaagggtggggcacctggattcaaagttgcaattttgggggcttctgggggaattggtcaacccctttctttgctgatgaagatgaacccattggtttcagttcttcatctttatgatgttgtcaacacccctggtg

SEQ ID NO: 370 - DNA, 282 bp, Glycine max
  Clone ID: 700553749H1
gaaatgatgcaggagtgcaagaaatggccaacgaaaaattggagaggaggtgcaggttacatatcaaaggatgtggttgtgaaaggcttacccagtcctagtgatgatactctaatacttgtgtgtggacccccgggtatgataaagcaatatctggagaaaaggccaaggactggacacaaggagaggtttctggcatcctaaaagaggctggatacactgaacaaatggtatacaaattctgagaaatttagttttcttgcatctgaattccaagcactt

SEQ ID NO: 371 - DNA, 279 bp, Glycine max
  unsure (1)..(279): unsure at all n locations; Clone ID: 700553751H1
ctaaccctatcttctctcttgtcttgnttccattcaatttaaacctcagggcgtggcaagtttcaacctttttcgagcacccattancattaacatggccattccctacccccatttcatcgccaccgagaaagccgccaggacgccggcctcctccacccctcctccccctcctccgtcatcctcancccaagacgacctcaagaaaatcgccgnctacaaggccgtcgagtacgtcgagtccggcatggtcctcgggctcggnaccggctccactgg

SEQ ID NO: 372 - DNA, 275 bp, Glycine max
  unsure (1)..(275): unsure at all n locations; Clone ID: 700553752H1
ctgacagtattcgggttatgggtgacaaagcaactgccagagagacaatgaagaaagcaggtgttcccaccgttccgggaagtgatggccttttacagagcacagaagaagctatcagactggcaaatgagattggtttcctgtgatgatcaaggcaacagctggtggtggaggacgtggcatgcgtcttgctaaagaacctgctgagtttgtgaagtttttacagcaagctaagagtnatgcagctgctgcatttggcaatgatggggttattt

SEQ ID NO: 373 - DNA, 278 bp, Glycine max
  unsure (1)..(278): unsure at all n locations; Clone ID: 700553753H1
agatggataaggcttctatcattaaggatgctattgagtacatccagcacttgcatgaccaagagnagagaatccaagctgagattttggatcttgantctgggaataaactcanaaacccaacctatgnatttgaccagaccnccctnttctgctcaggtccnagangaagagaacagannagctatccggttctgtcagtncaaganattctccanttnganataattgacgtataanncctaactcatcactctcttgtanatttnannttagtt

SEQ ID NO: 374 - DNA, 274 bp, Glycine max
  unsure (1)..(274): unsure at all n locations; Clone ID: 700553754H1
tcccctttgccgctgttgttgttgctgcaccaccgaacaacttnccctgtaaatcgcgtttcgtttgtgcaaggttttaaaagatggctgatgctgaggacattcaacctcttgttgttgataatggaactggaatggcaaggctggttttgcaggtgatgatgctcctagggccgtgttccccagnattattgggagaccacgccatactggtgtaatggttgggatgggtcagaaggatgcttacgtgggtgatgaagcccaatcaaaaagg

SEQ ID NO: 375 - DNA, 111 bp, Glycine max
  unsure (1)..(111): unsure at all n locations; Clone ID: 700553755H1
ctactctccgctcccaagngcacgcaccaccnacttattgcacttgcttgcctngttactcacctactntggactgtctcgcntcggnanacnnctggtgtnnanacttca

SEQ ID NO: 376 - DNA, 277 bp, Glycine max
  unsure (1)..(277): unsure at all n locations; Clone ID: 700553756H1
attttcctttgtaatgganagtnagaaaccctcatcgtcaaagcacgcgttttttttaatctctctctctcaacaaatatttgtgggtagattcaattcaccatgtcgagctcatcggagtactctgaattttccggccaaaaccggcgaggtcgccggagaaatcgagcttctctcagacttgnagtctgttgagtcaatacatcaaggagaagggtagcttcggagatcttaccctcggaatgacatcatgtgggtcacctgagacatcttgtca

SEQ ID NO: 377 - DNA, 277 bp, Glycine max
  Clone ID: 700553757H1
ggggaaacctgaattcactgaccatttgacacacaagctaaagcaccatcctggtcaaattgaggctgctgctattatggagcatatcttggatggaagttcctacatgaaagctgctaagaagttgcatgagattgatccttgcaaaagccaaaacaagatagatatgcccttagaacttcaccacagtggcttggtcctcttattgaagtgattcgtttctcaaccaagtcaattgagagagagatcaactctgtgaatgacaaccctttgattg

SEQ ID NO: 378 - DNA, 275 bp, Glycine max
  Clone ID: 700553760H1
caatcaacggttatacccttttctatttgagcatcatcatgtccaccgcagcgcagcccaaggccaagaaaacggcgtcgtccaagaagcccctctcccatcctaccttcgccgcgatgatagcggaggcgatagcgagtctgaaggagagaaccggttcgagccaatacgcgataaccaaattcatcgaaggcaagcacaaggagttgcctccaacctacaagaagcttgttctcgttcatctcaagaagtctgttgctgctggcaagctcgtt

SEQ ID NO: 379 - DNA, 273 bp, Glycine max
  unsure (1)..(273): unsure at all n locations; Clone ID: 700553761H1
aaactagatctagactaagatggagaaattgcaagaaattgcagtgtccttggctgttgattatttgcttccacncatnaancnacccgngaattcagtcatggaggttccaaaagatgctgcaganatgaaanacaacttgatgggattcaagccatgattcatgatgtggacaagaggncagcagacgaagaaggcaactcacgtganggtctcaaagcaaaggtgaagcagctggtggaaacatctttntgcatggaagatatcgttgat

SEQ ID NO: 380 - DNA, 252 bp, Glycine max
  unsure (1)..(252): unsure at all n locations; Clone ID: 700553763H1
aaacactatagcaatagncacatttgcttttgaaaaancccctcactncttcatcactacacctagctanccacatacaatgtcgaccaaatttaaggtgtttcgtgaattcacaacgatgactcattcctaaaccaagttatccctgaaaacatcaccgaattccaagtgactctgtccctcgctagagactacgatggcaacaactcaaccaacggaaagttcattccttactgggacactgaaaaggtc

SEQ ID NO: 381 - DNA, 279 bp, Glycine max
  unsure (1)..(279): unsure at all n locations; Clone ID: 700553764H1
ctttatgttgctgaggattatgtttatttgcttaaggagtttgccaatactggtgacctattgctagccactaggacctatgattttanctatgagtagggctactgataatactttcatggggaagttgaccagcaacatgattaggacccttggcaggttaaagaagattgagcttgccttggatttgtttgaagagtctaggactaganggtatggaaacactgtctattccttttctgccatgattagtgcacttggcaggaacaatcgcttttt

SEQ ID NO: 382 - DNA, 278 bp, Glycine max
  unsure (1)..(278): unsure at all n locations; Clone ID: 700553766H1
gttgtttggtctcttctctcttatccatggcatcaacgtttctcaccctaccaactcccttcctacncaaaaccaatgccatcagtttctctaanaagagaccctcatttttgcagaggagctctctgaagattcatgcnttaccanaaaatgggaacccacaaaggttgtgcctcaggctganaganttcttattcgtttggaggagctttcanntaaaacagttggtggagtttngctgnctaaatcagntgtnnaattntgaggctaacttgngg

SEQ ID NO: 383 - DNA, 273 bp, Glycine max
  unsure (1)..(273): unsure at all n locations; Clone ID: 700553768H1
tagaatggctttgaagcttgtaaatctagggtttcactcatcgattccgtgttctccgaggcccttgaaagatcggttcgtgcttcggtcttctaaagtggagcaaatatcgtttacggaatctgagaactcactcacgaagcccttcttggcatccaaggacgcggacgttcttctnctcgtcagcagctcaatgctgttgagcgtgctgttcaagtcctggagcggttagggggtgtacctgatccgacaaaatcaaacttgatcgagggt

SEQ ID NO: 384 - DNA, 275 bp, Glycine max
  unsure (1)..(275): unsure at all n locations; Clone ID: 700553769H1
ctccctctgcgcaggaattgggaacattcgacaggtagagtttcttcaatggctcctaaagttgataagaagaacgacccaaaggcacaggccttgaagactgctaaggcagttaagtctggtgctacctttaagaaaaggcaaagaagatccgaacttctgtcacttnccacagaccgaggacattgaagaaggataggaaccccaagtaccctcgcattagcgcgcctccaagaaataagcttgatcattatcagatcctgaaataccctctg

SEQ ID NO: 385 - DNA, 272 bp, Glycine max
  unsure (1)..(272): unsure at all n locations; Clone ID: 700553770H1
gttgctgtaggagataagattgcagtagtgctaagtgctaacacctgcagtgaacaatggcctctgcatcagcatctctgctcaagtcttcacttgttcttgacaagtctgagtgggtgaagggacaaacccttcgccaccttctgcatcagttgtgagatgcaaccccaccaccccatcaggcctnaccatcagagctggttcctatgctgatgagctcgttaagaccgcgaaaacagtggttcaacagggaggggtatttggccatggat

SEQ ID NO: 386 - DNA, 275 bp, Glycine max
  unsure (1)..(275): unsure at all n locations; Clone ID: 700553771H1
ttgcattgttaagtcacattttgaggcatattcttccgattcgctggttctcagcgtgntcnttnntnagaannntnaacatnnacatnaccgtttccatgatggctgcttcantacaacaccttctacatctatccncgtcttcaaatgccaagatacnttngcctgaagccatatcagagantgactggaancatgcagagnttgtatgtaaccngtcgtgggacgagtgcggaatccatgnngnganngannaaagtagcntngangntatt

SEQ ID NO: 387 - DNA, 273 bp, Glycine max
  unsure (1)..(273): unsure at all n locations; Clone ID: 700553772H1
tatagagacgaggagccgaagctgngagtttgaagatcccactttgtatcattatgcaatattctcggataatgtaatagctgtgtcggtggtggtgagatcagtggtgaagaatgcagtggaaccatggaagcatgttttcatgttgttacaaacaggatgaatgttggggcaatgaaggtttggtttaagatgaggcccattgacggtggtgcatttttagaggtgaaatcggtggaggaattcacattcttaaattcatcatatgtcccg

SEQ ID NO: 388 - DNA, 276 bp, Glycine max
  Clone ID: 700553773H1
atggctttgaatttgccttctcccgcccaagtgaagcccttatttttctcttcaaataactccacaaaacttccaggtagcttttctttgaagagaaaagatagtgacacaacagtagagagacgagtttattgctctccgctgctcaatcaccaccaccagcatggccaggaacagctatccccgagccttctgatttcaagacatgggatgggcaaaaacctatttctgtcttaggatctacgggttcaattggaactcagacactgagtatag

SEQ ID NO: 389 - DNA, 274 bp, Glycine max
  unsure (1)..(274): unsure at all n locations; Clone ID: 700553774H1
ctcattcttcatccatagacatggccaccgtcacttctgcagccgttgctattccctcattcactggcctcaaggcaagcgcaggcaaagtgagtgccgcagttaaagtctcagctccccaagccacaaggttgggctcaaggcttcgctgaaagacgttggagtcgctgttgtggccactncccgcgagtgcagtgctggctagcaacgccatggccattgnngtgttgctgggtggtgatgacgggtctctggctttcgttcccaacaattt

SEQ ID NO: 390 - DNA, 268 bp, Glycine max
  Clone ID: 700553775H1
acagccattgtttgtttactttccattgattgagcgaaagtttgttttttctgcgatcattttccattgggtggaagaaagtctcaacctttagtcgaaagagcaaggatctgagtgagtgagcgatcatgtgtgtggtgcgattatctccgacttcattccagcgggtcccgccggcggggcgcacgcgtgaccgccgacatcctgtggccgaatttgaggaagcggttctcgaagtcgctgctggacgatgatttcgaggcagggt

SEQ ID NO: 391 - DNA, 270 bp, Glycine max
  Clone ID: 700553776H1
gagcaccaacccccaacttgcaccacggctgcggtttatggttcgtgatgttctagatttgcgttctaataactggattccaagacgtgaagaggtgaaagccaaaaccatcactgaaattcattcagaggcagaaaaaatcttggattgcgtccaggtgccactgcaagtatgagaagtaaccgtgtagtttctggcgctcaaggaaataccggtccaggaggattcccaattgcccgacctggtacaggtggtttgatgcctgggatg

SEQ ID NO: 392 - DNA, 271 bp, Glycine max
  unsure (1)..(271): unsure at all n locations; Clone ID: 700553777H1
agaagatcaagatcaaggaagaggatgtcgaaagaggatgtgtttgttggcgcgatcgaccaaggaacgagcagcagcaggttcataatatacgacgcgaagactggagtagtaggatgccaccacgtggagttcaccagttctacccgcaagccgggtgggtggagcatgaccccatggagatnttggagagtgtgaaggtgtgcgtggccaaggccgtcgataaggccaccgctgatggcttcaacgtcgataaaggcttgaaggccat

SEQ ID NO: 393 - DNA, 272 bp, Glycine max
  Clone ID: 700553778H1
gatcgagataactagaaacagtgtgatgaaaatgaaggtccttgttttcttcgttgctacaattttggtagcatggcaatgccatgcgtacgatatgttccctctccgaatgaacactggctatggtgcccgtactcggaggtgaaatgcgcaagttggaggcttgctgtggaagcacacaacatctttggctttgagaccattcctgaagagtgcgttgaagcaacaaaggaatacatccatggcgaacaatatagatcagactccaaaac

SEQ ID NO: 394 - DNA, 276 bp, Glycine max
  unsure (1)..(276): unsure at all n locations; Clone ID: 700553779H1
aagncactttnccaacccaaaacctctctttcaaccctttctttctccaatcccaaaccatcatgtatcttccnngcnaccacatcctcannagaatctccccttatngcngccanttctcccactccgcngcngncgtctcnggcctccggggccgcagnncctcacctacctggacggcttcccccgccccgatcccaagcacgacgagacgatcctngccatcccccgcgccgactccggcaagaacatctccgccaaggaacgccgcgccgg

SEQ ID NO: 395 - DNA, 277 bp, Glycine max
  Clone ID: 700553780H1
ctccaaccaaccaacttcttaattaataactgtcgtcgtttcaatctcgttacacatctcaaaacgcagcagcagcacactcgacttaaaatgcaagccgtttcactctcacctttgtcgtctagggattcttccgacggttcgctggaaagttcgaacacgatttcgtggctaagctcaaaatcaacgaaaacgaaaacgaagagaagcataacgaagatgaggtagaagaagaggaagagtttagcttcgttctcacgaattccgatggatcgcc

SEQ ID NO: 396 - DNA, 273 bp, Glycine max
  unsure (1)..(273): unsure at all n locations; Clone ID: 700553782H1
gnatgccaatggcattctatccgtcactgctatcgacaaaggcacagggaagaaacaagatattaccatccactggtgctancaccttgccttcagatgaggnggagagaatggtaaacgaagctgagaaattttcgangaagacnaagagaagagggatgctattgacacnaaganccaggcagacttnttggtataccagacanantaagcnattgaaanagcttggtgacaagttcctgggncnttgtaanagaaggtgatccaaacttg

SEQ ID NO: 397 - DNA, 265 bp, Glycine max
  unsure (1)..(265): unsure at all n locations; Clone ID: 700553783H1
cagattcaaggaacatgatttagaaaactgccaagcccacccatattcattctctnaaaacttccaaccatgaactgaagcacnacacatacccacttcctccaaagacatcattnntattaccaatctccaatttcagaganaattctttgtgggcatctcttaatttcaaaaatgtcaagcttccccaacacggtggcggaaggccgcaggtccagcaaggcaccggaaaaatccactttttctcagacttgcagcctcttga

SEQ ID NO: 398 - DNA, 269 bp, Glycine max
  unsure (1)..(269): unsure at all n locations; Clone ID: 700553785H1
attttatccaattganatnttaaaaatgactgggatanacttaaganttcaattattgaaattgaataagtanacaatttaattggantggncgaatggtatcaaaaaaatggagtactaactcccatntcttattattattgaattaaccgatcaacttgctttgttatcgaacatntctttttgatttcaaaaattttccggaaaanatttgaatctattttatatgcgntcnannctactacntctggtcctgaggttcngcgcct

SEQ ID NO: 399 - DNA, 273 bp, Glycine max
  unsure (1)..(273): unsure at all n locations; Clone ID: 700553786H1
tagaaccttcactctgctatcccccatattcctgngtttcntttganannnnnagtnncagaaaaaacatgtactaggtnntntggattctncnttgngggtcttangttgatgtnggncggtgtggcnantgctatggctaactcttccaacaaatttgatcaactcttccaaccaagttgggcttttgaccactttattcatgaaagggatcttctcaaactcaaacttgacaaattttccggggctggtttnacttccaagagcaagtat

SEQ ID NO: 400 - DNA, 272 bp, Glycine max
  unsure (1)..(272): unsure at all n locations; Clone ID: 700553787H1
ggactagtaagattgaaatcatatgtatgaatttntccncatttggagaagaagtagaatgggatggagatgccttcaagaagtgnaaaatctcannanacntatcntcnagagtgattgntttnccgaangngccaagcntcttcctaatactttaagagtattggnatggtggagatgtcnctcacaggantggccacatnatttnaacccaaagcaacttgctataatgcaagttncccgntagtagctttacatcagtngggttngcc

SEQ ID NO: 401 - DNA, 271 bp, Glycine max
  Clone ID: 700553788H1
ccctctcaaccaaaaccaaccacttcatgttatcattgctatgacccttcaagcttttcatggctctgcatgttgtttccgttcccaccttcttcacttttcttcttccaccgcttcatctccaccattccttgctcgaggaggttccaatcatgcccttcaacaagaaaatctctcaatttgaattgcagttcaagtggcaataatggtgaccaagattaccttctggatgctccagtttctgttggagatggattctctttcagtggag

SEQ ID NO: 402 - DNA, 84 bp, Glycine max
  unsure (1)..(84): unsure at all n locations; Clone ID: 700553792H1
aaaganaagaaaggaataaattgtctcaagaaaggatacnaatangatagntgtaatttccacacnacatagcgnggnntgcat

SEQ ID NO: 403 - DNA, 101 bp, Glycine max
  unsure (1)..(101): unsure at all n locations; Clone ID: 700553793H1
anaagaaaagaaagganataaattgtcctcaagaaaaggataaaataaaataatgtaatttccacacaacatagcgagtntgngtancncangnggnnngc

SEQ ID NO: 404 - DNA, 271 bp, Glycine max
  unsure (1)..(271): unsure at all n locations; Clone ID: 700553794H1
anaagaaaagaaaggaataaattgtctcaagaaaggataaaataaaataatgtaatttccacaatccatatatagntaccctgtccagatttttagtcaattcagcagccaaccctgcaaagggcttcaactagaattcaagtttaaaggcacctgaggtagaagtggacatgaacagtggaagtcttggcccataaaacgattttgaaacttgttcactcgatgaagctacactgaaaaccccaagcaaattcatttattctgtttacgt

SEQ ID NO: 405 - DNA, 278 bp, Glycine max
  unsure (1)..(278): unsure at all n locations; Clone ID: 700553795H1
cgcaaanntggcacctgcaacantgtctctntctctcctcctcntgntctcactgctncancgccgtnnagcgttagatncggagngactancgactacgattgngtntacactgcatacgttagaaccggntcggnnttnanggcggaacggngtctaagatcgggctgaagctgtacgacaagtacggctactacatctacattaaaaacctcgangcatggggcggcttgatgggcaagggctacgactacttcgaangcggcaaccttcgncat

SEQ ID NO: 406 - DNA, 109 bp, Glycine max
  unsure (1)..(109): unsure at all n locations; Clone ID: 700553801H1
gcaagtttcatccccttgtgtgcttactgtatcaatnaatgcnacttataataaaagtgcatttcacatcnanaaaaaganannaannagggggggcngccgantngng

SEQ ID NO: 407 - DNA, 306 bp, Glycine max
  unsure (1)..(306): unsure at all n locations; Clone ID: 700553802H1
taatannntngctcactgtcttgtctctccagagaactgtatagagagagatggcagctgcaacatctggtgctgtgttaaatgggttgggatcttccttcttgagtggaggaaacaggagccaaacccttctggccactgctattggaggcaaagttggtgctgctgctgttactgttagtcctagaagactcattgtggtagctgctgctgcaccaaagaagtcatggctccctggtgtcagaggtggtggcaacctcgtcgacccagaatggcttgatggatcgctaccaggtgactatggct

SEQ ID NO: 408 - DNA, 293 bp, Glycine max
  Clone ID: 700553804H1
tgggaattttgggggctagaagttggctctgtaggagcatttcttcaagtccattgcgggtgtgtgttgttggaagtggtcctgctggtttctacactgccgagaagatgttgaaggctcaccaacaagcacaagttgatatcattgacaggttgcccacggcttttgggttggttcgctccgttgttgcacccgatcaccctgaaaccaagaaaacttgcaacaaattgtcatcaaccagttttcaaaggtggcacaacatgaacgatgctcatttttggggaatgtgaccc

SEQ ID NO: 409 - DNA, 303 bp, Glycine max
  unsure (1)..(303): unsure at all n locations; Clone ID: 700553805H1
ctccaccgtccattgcaaagtcttgcgcccaatttccatggaactgtaaagagaggatagttagaagattaaatcttaaagcagtaagtcatcatggataaatcagnnnnnnnnnnnnnnnnnnnnnnnnnnnnnnnnnntgtgatgggagttgccgcaggggctagccaaatggcctattcttctcactacccgactgcttccatggtggcttctggcacgcccgctgtaactgctccttccccaactcaggctccagctgccttctctagttctgctcaccagcttgcataccagcaagca

SEQ ID NO: 410 - DNA, 298 bp, Glycine max
  Clone ID: 700553806H1
aagatatggcaatgttcacgtaccacgttgaaacggttcaatcatggttggcactgagcagacttcacatactgatccacttagtggcagtgttgtcgctgtgttactaccgcataactcacttgttactggaacctccaacagcgccatggcttctgatgaccgtagcggagttcttctctcggtgctctggttcttcaaccaagccttccggtggcggccggtgtcgcggaggtcatgacggagaagctgccgagggatgagaagctgccggggcttgacatcttcgtgtgcacgc

SEQ ID NO: 411 - DNA, 231 bp, Glycine max
  Clone ID: 700553808H1
ggttttctttctcgaactcgaacgaagatgcgtgagattcttcacatccagggagggcaatgcgggaaccagatcggagccaagttctgggaggtggtgtgcgcggagcacgggatcgattcaacggggaggtaccaaggggacaacgagttgcaactcgagcgagtcaacgtctactacaatgaagcgagttgcggaaggttcgtgcctagggcggtgctcatggatctg

SEQ ID NO: 412 - DNA, 299 bp, Glycine max
  Clone ID: 700553809H1
gaagcattggttttggtactagaggttgtagctttgacactagtggtagctgcagtggtaatagtgataggatctttgtgagggcaaagacaaggtcccgtggctttgcatcgaatcgccgccagccgatgttggctgatttggagcaaaggaattctgttaggagtgatgagagtgatgctactttggttaaggttgataatggatctataaatggaagtcctgctaagcctccttgtttcagtgatcatcgattatcccagaaacttgtggttgctgttgatgttgatgaggatatg

SEQ ID NO: 413 - DNA, 289 bp, Glycine max
  unsure (1)..(289): unsure at all n locations; Clone ID: 700553810H1
tntnccttctnngctttcattgccaannccctagtgtggcctagctgttttctcaatatgagaaaggcttccactctgcaatgntcactttggcgcttcggtgtttcgctattgctggttgccagcttcatttgtgcttcttctgttatggcaacatctgaagtttcagggaatgaagtggataccgatgggaagcttgtaaatgaagagccagcaaaaacaagccttcaaggatatgatgaagaagaaaaatttaaagggctttttccaaaatctattcctatagtta

SEQ ID NO: 414 - DNA, 258 bp, Glycine max
  unsure (1)..(258): unsure at all n locations; Clone ID: 700553811H1
gtcatactttttcggcacccgtctaaacaacgttaacacgacaaccttaaacaacggaagattccacgcgctcttgaacttcggcaaaaagaagacggcgccgcagccgccgccgaagaaaaaggaagtgaaagtgaaaccctccggagnaccggctggtgtggttcccgaatgcggagccgccggagtggctcgatggaagcatgatcggcgaccgcgggttcgacccgttcgggttcgcgaacccgcggagtacct

SEQ ID NO: 415 - DNA, 292 bp, Glycine max
  unsure (1)..(292): unsure at all n locations; Clone ID: 700553813H1
tttcctttcgggattggtttctatggcttctgaagtaatagagtaccgatgctttntcggtgggcttgcttgggccaccgacagcgatgctctcgagaaagccttctctcattatggttatcatcgatcgtgaaactggaagatcgagagggtttggatttgtgaccttcgcctcggagcaggcgatgaaanacgcaatcgaaggaatgaacggtcagaacctcgacggtcgtagtatcacagtgaacgaagcacaatcccgtggaagaggcggtggtggcggtggatacgt

SEQ ID NO: 416 - DNA, 293 bp, Glycine max
  unsure (1)..(293): unsure at all n locations; Clone ID: 700553814H1
ctctctccttctcgctctttcagctttgacttttgtnggnaactaaggcctaatcaaaatggtgaagttcncagctgaagagctacgtcgtattatggactataagcataatatcccgtaatatgtctgtcattgctcatgttgatcacggaaaatcaaccctcactgattctcttgtggctgctgctggtattattgctcaagaagttgccggtgatgtccgtatgactgatacccgtgcagatgaagctgagcgtggtattaccatcaagtctacaggtatctcacnctac

SEQ ID NO: 417 - DNA, 294 bp, Glycine max
  unsure (1)..(294): unsure at all n locations; Clone ID: 700553815H1
acacttgaaataatgccaagtatactaaatgtcttagtcttaagaggggggaaaaactggaattccaatgattcttaatttcttacaatccaatctgcaaactgagtgagatatataacttgtntttgatttcttcctcatcattttgcatatacaaagattaaaatggaagggttttttgganattncttcaatatgattttgctgatgttgtgcttcaccaacttgagcatagcttttgctcaaagtcatatgaatggatntggagngcagccactggccaagattgccatt

SEQ ID NO: 418 - DNA, 297 bp, Glycine max
  Clone ID: 700553816H1
gtcaccattgctcaccggttaccttattcttcggttaacttttattcgtacgagcactacaagaagttgctaaagatggttccgggacttcaaagtcatagggataatgttagtgcagacctttgcgtacattttgttggtggtggcctggcaggagtcactgctgccacaactacttatccattggatcttgtaagaacacggctggctgcacagacaaattttacctactacagaggtatctggcatgctttacacacaattagcaaggaagagggaatatttggcctttataag

SEQ ID NO: 419 - DNA, 307 bp, Glycine max
  unsure (1)..(307): unsure at all n locations; Clone ID: 700553817H1
tgacatctggttttgaagttggtcctgcaacaactgctggtgcagatgcatcatcaagtcaaaacactcgatcggtgttgactattgccttccagttcccttttgacagcagtctgcaagacaacgtcgcggtcatggcacgccaatatgtccgcagtgtgatttcctccgtgcagagggttgccatggctatatctcnctctggtatnnacccatcaattggagctaaactttctcctggttctccagaggctgttacactagctcactggatctgccanagttatagttactatttagggtccga

SEQ ID NO: 420 - DNA, 302 bp, Glycine max
  Clone ID: 700553818H1
caaaggattctacccgccgctcgatgggaattgcgcttcaaggcgtctcgtagggctaatccgcctcacgagggtcaccaacggcacgtgcctttggggggccgaggccccctactgctggtcggcaaacggacggcgggcgcacgcgtcgcttctagcccggattctgacttagaggcgttcagtcataatccaacgcacggtagcttcgcgccactggcttttacaaccaagcgcgatgaccaattgtgcgaatcaacggttcctctcgtactaggttgaatactattgcgacactgtca

SEQ ID NO: 421 - DNA, 301 bp, Glycine max
  Clone ID: 700553819H1
tacaactccaaacacaaagacatcatcatccatggctgcctccgtctccactgtcggagctgtcaacagagctcttttgaacctgaatggttctggagctggagcttcagctcccagttcagccttctttgggaccagcttgaagaaggttattgcctcaagggtccccaacagcaaggtttcctctggaagcttcaagattgttgctgtagaagagaagaaagagattgaagagacccagcagaccgacaaggacagatggaagggtcttgcctatgatatctcagacgaccaacaagac

SEQ ID NO: 422 - DNA, 300 bp, Glycine max
  Clone ID: 700553820H1
cgttgccattctcatcctcttctttctctctctaccattgccatggatccctacaagcaccggccatccagcgccttcaattctcccttctggactacaaattctggtgctcctatttggaacaacaactcctctttaaccgttggagctagaggtccaattctgctggaggattatcatcttgtggagaagcttgcaaattttgatagggaacgtatcccagaacgtgttgtccatgccaggggcgctagtgcaaagggtttctttgaggtcacccatgacatttctcacctgacatgt

SEQ ID NO: 423 - DNA, 299 bp, Glycine max
  Clone ID: 700553821H1
gcaagacaggcccaaccatacaacttgtcagtgcagctggctaatgcagctgaatctgccacaactatgccttctagccagtcccaaaatcaaccaagttctgctgcttacaactcaacaagaaatcctaattttgaaatggcagcaggtgcatgtagaaccgcacctgccacccctcaattggttcaagtttcttctagtaagcatcaacagcaatatgttgctcactctcaaatttatcatcgccatcctcaatcaatgcctcctaagtctgcagtacctgcaaattatgcttacaa

SEQ ID NO: 424 - DNA, 289 bp, Glycine max
  Clone ID: 700553822H1
tgcctctgtgactgccctccccctctctcgctcttccaacttgctcctgggctggcgaatctctctgtcctcagattgtggaagtaatgacccggatctaaaggaggagatggagaagcagtttgtggaccttctcagcgaggagttgaagttgcaagagtctgttactgaagcaaacactcggcacatgaacataactttggctgaagcaaaaagagtggcgtctcagtaccagagagaggcagataaatgcataactgcaatgaaacatgcgagcaggcaagagaac

SEQ ID NO: 425 - DNA, 286 bp, Glycine max
  unsure (1)..(286): unsure at all n locations; Clone ID: 700553823H1
gctccctcacacacacaccccttcatgcttcccagcaccgacttccaccgactctgcctccncctctttcgcagaatcgttcccgangccctcctctcggtgtatgtnaganctgctggtagttatgtnatgggttgnnncngtggtgggtngcactgtaccctggagtngcagangcagagggcattgtcattctngtgggtcattttaatattcctgcaggcttgcgtgcngccaaggncacgctttccaattcgcaagtnaatgtngnccctgaatgtaaggc

SEQ ID NO: 426 - DNA, 298 bp, Glycine max
  unsure (1)..(298): unsure at all n locations; Clone ID: 700553824H1
ctgctccaagttattgatattgttattttttacatttatatttgataatagaaaattcaaatattaatgggatggattagtggttggtgttgtggttcatttatatttggcaggtaatatcatcctaaaaacagaaccgcatttcacgacaaaggcaggtaatcaantgttttttattttttntaagcaattgtatcttacccgtggtaaaatgaaaaaggtaatcaatcttnttttgtccaaataggacttgtgtatttgttgttgaaaactggccaaaattttcaaattgtgtatt

SEQ ID NO: 427 - DNA, 293 bp, Glycine max
  unsure (1)..(293): unsure at all n locations; Clone ID: 700553826H1
ctctaatatttttctcactgtcttgtctctccagagaactgtatagagagagatggcagctgcaacatctggtgctgtgttaaatgggttgggatcttccttcttgagtggaggaaacaggagccaaacccttctggccactgctattggaggcaaannnnnnnnnnnnnnnnnnnnnnnnagtcctagaagactcattgtggtagctgctgctgcaccaaagaagtcatggctccctggtgtcagaggtggtggcaacctcgtcgacccagaatggcttgatggatcgctac

SEQ ID NO: 428 - DNA, 294 bp, Glycine max
  Clone ID: 700553827H1
aacaacacaaggccatcatcatggcagctgcttctcctatggcaagccaactcaagtccaccttcactaaaactcttgtagctcccaagggcctctctgcctcttcaccactccacctcctgccttctaagaggcaatttagcttcactgttagggccatccaatcagaaaagccaacctatcaagtgattcaaccaatcaacggtgatcccttcattggaagccttgaaaccccagttacatccagccccttgattgcatggtacttatcgaacctccccgcatacaggaccg

SEQ ID NO: 429 - DNA, 258 bp, Glycine max
  unsure (1)..(258): unsure at all n locations; Clone ID: 700553830H1
gatggcaaatgaactacccgtcaaagctttnggttgggctgcttcagacacttctggcacccttgccccttttcatttcnccagaagggaaaatggcgtcgatgacgtcactctcaagattctcttctgcggggtttgccactctgattnccacacnctcaaaaacgactggggtttcaccacctaccctgtcgttcctgggcatgaaattgttggtgttgtgacagaagttggaaacaagtggnaaaaacttcaaag

SEQ ID NO: 430 - DNA, 294 bp, Glycine max
  Clone ID: 700553831H1
atgggttggcttagtcggttcataactgccgtggctttcttagccatcggagtgatattctcaccggagacactggggtcaaaatcaaccacactttccacctacctcaaactcgctcacctcctctgcttctccaccgccttcggcgccgctctgtgggtaacattcatcggcggcatcatcatgtttaaaaatctgccgcggcatcagtttgggaacctgcaaagcaagatgtttccggcgtatttctcgatggtgggtgtctgctgcgccgtatcggtggcttcctttggc

SEQ ID NO: 431 - DNA, 296 bp, Glycine max
  unsure (1)..(296): unsure at all n locations; Clone ID: 700553832H1
caggactttcccactacacacccacnntctctctttttctttcagctccaaactcacgtgcagcaggtcctctctcaanncacgaccaacaaactgactcttgttcctctaatactaccacggtttctgttgcacccgaaaacgattctgagacccagcagcaggaaatggattggaagagcgacgaggagtttaagaagttcatgggcaacccttccatcgaagccgctataaagctcgagaagaagagggctgacagaaagctcaagcagcttgacagagaaaccaccaacata

SEQ ID NO: 432 - DNA, 305 bp, Glycine max
  unsure (1)..(305): unsure at all n locations; Clone ID: 700553833H1
gcgacgatgaaagcaatgacagcaacgacaacgtttgatgtctctgccgcttgcttccgtgcccctccttcttgttcaccgaatccatgccacaccagtttttcagttataaactccctgaatcctcacaagggacgacggataagcgttgctgttccacctaagtttccaagcttccgggaagcagctctgcaggggaatttggaggctgttagagtcccaacttcggtgcctgtgcgtgtagcatacgaactnctcctagctggtcatcgatatttggatgtaaggactccagaagagttcaa

SEQ ID NO: 433 - DNA, 300 bp, Glycine max
  Clone ID: 700553834H1
aaaatgctgttgataacttcagagctggaaaaacatgggttttgattgctactgatgtagttgcccgtggcatggatttcaaaggtgtgaactgtgtgatcaattatgatttccccgattctgctgctgcttatgtccacagaattggtcgttctggcagagcagggaggactggagaagcaattactttttacacagaagatgacattcctttccttcggaatgttgctaatcttatggcagcatcgggctgtgaggttccttcctatctcatggagttgcgcaaaaagaagtggaaga

SEQ ID NO: 434 - DNA, 301 bp, Glycine max
  unsure (1)..(301): unsure at all n locations; Clone ID: 700553835H1
ctcttcatcaccctcatcntcatcactttcattgccttatcaacatccttcgccttcgcctttctctacttctcttgcaaaaccaccactttcaccttctccttcttctctctctctcttctcatcaaaagctcgtcctctctccaaactcaaacgccccgtcgtcctcctagtctcctccgacggctttcgtttcggttaccaattcaaagccccaactccccacatttcccgtttgatcgctaacggaaccgaagctgaatccggtttgattccggttttcccctctctcactttcccc

SEQ ID NO: 435 - DNA, 296 bp, Glycine max
  Clone ID: 700553839H1
actcaacttcagttcaagagaaagcaatgccatccaaaagggtctttctacgtctccgcatcgagcaccaagaaaatcctaataatgggaggcaccaggtttattggtgtgtttttgtctaggctccttgtcaaagagggtcaccaggtgactttattcacaagaggtaaagcgcctgtcactcaacagttgccaggtgaatcagacagtgattatgctgatttttcttccaagatcttgcatttgaaaggagacaggaaggacttcgactttgtaaaatccagtctctcagcaga

SEQ ID NO: 436 - DNA, 297 bp, Glycine max
  Clone ID: 700553840H1
gagatctagtgctgccaaacctcgctgaaaattagggtttcgtttcggaggtagacgaagatgttcggaagggcaccgaagaaaagcgacagcaccaggtactacgaaatcctcggcgtttcgaagaacgcttcgccggatgatttaaagaaggcttacaagaaagccgccattaagaaccaccctgacaaaggcggtgatcctgagaagttcaaagagcttgctcaagcctatgaggttctgagtgaccctgagaagcgtgaaatttatgacacatatggagaagatgctcttaag

SEQ ID NO: 437 - DNA, 294 bp, Glycine max
  unsure (1)..(294): unsure at all n locations; Clone ID: 700553841H1
atccattcaagacattctncctataatttctgtcattcttgagctcccaccagaatcccagcagcaattgcttcaattgccagttaacttggttagaaagttaatatctcgtgctgctgcaagaactgtaaggagggcctttttataacatggatgaagtagctgaagctgaaatctttttgtacttctcaacaagtgaccggagaacattgaaaaataaataaggcttatgacaaggccttaatccttaatgcttcaatacactgttgattcaacaacatattcttcgctttc

SEQ ID NO: 438 - DNA, 292 bp, Glycine max
  Clone ID: 700553842H1
gagtataatgtgagcctgcagcagtacaatagtcgtcttcagtcagatcttgaaactgctaatgaggcccataaacgacttgaatcagagaaagcaaccattgttgagagccttagcaatgtaagaggccacaataaggcattgcaggatcaattggtatctcttaaagtttcacaagacgaggctataaagcagaaagaaattttaggaaatgagctcaaatgccttcgtgaagagttaaaacaaattagagatgatcgtgatcaccaattgggtcaagtaaatgctttaa

SEQ ID NO: 439 - DNA, 293 bp, Glycine max
  unsure (1)..(293): unsure at all n locations; Clone ID: 700553843H1
taattcatagcagccactggcaccgctcttcatcttcaccagcccaacatggccacaatccagtgcgccacaaccaccctaatannnnnnnnnnnnnnnnnnnnnnnnnnnncaagatccaattcccaacaagagtacgtagcacaacaagcaactagactgcaacaacgaatacaactccacaaagggtaacctctgcaacagtctcccgtcatgcacctcctacctcaccttcaagtcctccccgccggaatacaccacccccgccgccatctccttcctcctcaactcca

SEQ ID NO: 440 - DNA, 293 bp, Glycine max
  unsure (1)..(293): unsure at all n locations; Clone ID: 700553844H1
cacgaatctcaaatacattctggtgccattttatcttgcggagttgacaganancatagcacaggatgacaggatacagattctaaagtcttcccaggcaaaacttaaggagtttatctcattttgtgaagcaatggagctggtcccaaaagaggagttagaatcttacattgatggggcaccaancaactgttgctgatcagagggccaggaagatcgctaggttcaaacgtcagagagctgcagaatcaaagttgttggaaatacaagagcgaaaggaaacgacgtgggcg

SEQ ID NO: 441 - DNA, 288 bp, Glycine max
  unsure (1)..(288): unsure at all n locations; Clone ID: 700553845H1
gggaaaacatcaaggccttcaaccttgccggaatggggtgcagtgcaagtgttgttgctatcgatgtggtgcaacagcttttcaagacttacaagaactccgttgggattgttgtgagcaccgaggatctcggtgcgcattggtactgtggnagggacaagaagatgatgctctctaactgtctctttcgctctggtggctgctccatgatgtttacaaacaaggcttctntcaagagccgtgcgatattgaagctcaagcacatggagaggactcagtatggtgctg

SEQ ID NO: 442 - DNA, 290 bp, Glycine max
  Clone ID: 700553846H1
gctgcacctccaccatctagcatatcagagacaaatggttctgttataaatactaatgaagttggaaacattcaagaagctgaagccgagggctattctatttatgtgaaaggtctgccaccaactgctacgcctgcagtcttggagaatgagtttaagaagtttggacctattaagagtggtggcatccaagttaggagccaaaagggattttcctatggctttgtggagtttgaagtggcaagtgctgcgcaaagtgcacttgaggcttctccaatttcgatcaatgg

SEQ ID NO: 443 - DNA, 291 bp, Glycine max
  unsure (1)..(291): unsure at all n locations; Clone ID: 700553847H1
ggatgggtcatttcacaaaaggctanataaagctggaatatatatggttgaagacttcttaagacttgtggtcagagaccctcagagattgcggaatattcttgggagtggcatgtcaaataagatgtgggatattcttgttgagcacgcaaagacctgtgttctcagtggaaaactttacgttcactatcctgaagatgcaagaaatgtgggtgttgttttcaataatatttatgaattaagtggcttaattgccaacgaccaatattactcagctgnantctctctctg

SEQ ID NO: 444 - DNA, 293 bp, Glycine max
  unsure (1)..(293): unsure at all n locations; Clone ID: 700553848H1
ctttctctctttcttctcttctcttctctgcaacacaatctctctccatntggttcaaacactgtcattcttctcctgcaggaaaaaaaaatcagatctaccctctcacaatgttgcaggagatgtggaatgctcctcccggtctcagaccctccaagtctgcaccttgttctccggcaaagcctcttggggtcgttccaagaacgcgttctgagtccttccacgtggctcacaaggtcccagttggtgacactccttatgtcagagccaaaaacgttcagttggtggataag

SEQ ID NO: 445 - DNA, 302 bp, Glycine max
  unsure (1)..(302): unsure at all n locations; Clone ID: 700553849H1
aaacactcataacacaaagcacaaagcaaagctcatccttgagttaaaaaatgggcagcagcttcttccatggctctctcatccccatccttggctggcaaggccgtgaagctgggcccatcagccccagaagtgggaagggtgagcatgaggaagaccgtcaccaagcaggtctcctcaggaagcccatggtanggcccagaccgagtcaagtacttgggcccattctctggcgagcccccgtcctacctaaccggtgagttcccaggcgactacggctgggacactgctgggctttccgc

SEQ ID NO: 446 - DNA, 295 bp, Glycine max
  unsure (1)..(295): unsure at all n locations; Clone ID: 700553850H1
cttcaacttccaaagggagaacgtggcaaagcaagtgcctgagcagaacggcctcacacactttgaggctggtgatacacgtgccaaggagtatgtcagcctcctcaaatccaatgaccctgttggattcaacattgttgatgtcttggcttggggctccattggccatgttgttgcttactacatcttggccaccactagcaatggctatgaccctgcattctttggctgatttaattcancatcatgttgttccaactgtgtttcttgcttactttttagtatgtaatgtaat

SEQ ID NO: 447 - DNA, 276 bp, Glycine max
  unsure (1)..(276): unsure at all n locations; Clone ID: 700553851H1
ttgagaactaagaagaaggaaatangcttcctcaatgatcncctccccagctgttaccaccgtcaaccgtgccggtgccggcatggttgctccattcaccggcctcaaatccatggctggcttccccacgaggaagaccaacaatgacattacctccattgctagcaacggtggaagagtacaatgcatgcaggtgtggccaccaattggcaagaagaagttcgagactctttcctacttgccagacctcgatgatgcccaattggcaaaggaagt

SEQ ID NO: 448 - DNA, 293 bp, Glycine max
  unsure (1)..(293): unsure at all n locations; Clone ID: 700553852H1
aggactagaatcatagaaaatgaacatactaatcccagatggtatgagtcttttcacatttattgtgctcatatggcttcaaatatcatattcactgtgaaagatgataatcctattggggcaactttaattggaagagcttatgtgcctgtttcggaggtcttggatggtgaggaaatagataggtgggttgaaatcttggacgaggaaaaaaacccaatacaagagggttcaaagatccatgtgaagctgcnatattttgatgtcacaaaagaccgcaactgggctcgagg

SEQ ID NO: 449 - DNA, 293 bp, Glycine max
  Clone ID: 700553853H1
ggaggaggaagactcattgctagggcaagttgaaatatggaggtacatgacatgcttcacggactccgtggccttgaaatccgtcatagagctgcgcatagccgacataatagaccgttatgggaaaccactatccttgtcacaaatcgtggagaacatagatgatgcaccctccccagatgcctctcttctacagagagtgatgagagtgatggtacgtagaaagatcttcagtgcagaacaatcagagactggagagaccctctacggcttgacacgtgcctcgaagtgga

SEQ ID NO: 450 - DNA, 293 bp, Glycine max
  Clone ID: 700553855H1
ctaaattctcaaaggcaccaatttcattgctcagagttcccaaattctccccaagagataaaatgtctctaatcccaaacttcttcggtggccggagaaacaatgtgttcgatcctttctcactggacgtgtgggatcccttcaaggattttcctttcccaaatacgctttcttcagcttccttccctgaattttctcgggaaaattcagcatttgtgagcacccgtgtggactggaaggagaccccagaggcgcacgtgttcaaggcagatattccaggactgaagaaggag

SEQ ID NO: 451 - DNA, 294 bp, Glycine max
  unsure (1)..(294): unsure at all n locations; Clone ID: 700553856H1
gggaactcanaatgaaatgaaatggaaangtaagaagtagtactgaaaactgaactcaacnaactcgtgactcgtcagagagaagaanagaatatcgttcgttcgctctnaccttcttcaccttccttcctctctctctctagagaatggaaccggaatccggaacttcgacttctcggaatccttctcagttgtcttgggtgaatctgtctaggaatttattatnagcgtatcaaagctttggtgtggtgtatggagatctgagcacttctcctctctatgtcttcacaagca

SEQ ID NO: 452 - DNA, 290 bp, Glycine max
  Clone ID: 700553858H1
gttcaaacactctcatcttcttattcttctgctttcactctctgactcaatcgttctaatccacaaaaaatgaccttaaattacaacattgccctcgccttctctgcggtgctcacgctgctcctctttcccctactgaccgtaggggagctcgtggaggagcagccactagtcctcaagtaccacaatcgccagctcctgaagggccgcatcaccgtcaatctcatctggtacggcaccttcaccccgatccaacggtccataatcgtggacttcataattcggttaag

SEQ ID NO: 453 - DNA, 290 bp, Glycine max
  unsure (1)..(290): unsure at all n locations; Clone ID: 700553859H1
caactttcaacgccagttcacactctctgcttcgcgtgtaccaacaagtggcaagttcgaatcaatggccagcgctcagcttcacagcaatagcgtcatcgatctctacggcgtcgtttgaagggcttcgaccttccgctgttcagtttgcttccacgggcagaattagaattggcaatctctcccnaaggtccttccggggcttggttgtcaaagccgccaccgttgttgcccccaaatacactgcgataaagcctctgggagatagagtgctaataaanaattaagga

SEQ ID NO: 454 - DNA, 286 bp, Glycine max
  unsure (1)..(286): unsure at all n locations; Clone ID: 700553860H1
tacaaccttatattctcccattcatcataaccaaaaactttgtcactggcttatttattctctattaanantatatcctttgggtattgtattgtatcgtattgcttnatacaaattctnaactcaattagcctagctagctaggtcattataaaaaaaattaaaatagtgttccttgatggctnaccagaagaatcaaaacccggattcaggaaccattagtgttgaatcagcaaaagaaaaaagaaggaacaaacttcccaacttcctgctatcagtgagactc

SEQ ID NO: 455 - DNA, 249 bp, Glycine max
  unsure (1)..(249): unsure at all n locations; Clone ID: 700553862H1
tattgtatggccgccaattccagtagccgagggatcaccgccttagggaagcgagtcgccaaccggatctggacttccaacgcacctcctctcacttcaaggaggggagcatacagtagcggctcagtgtacgacaagaacncctgatggagagatccagtctgggcaggtcccagacgatgtgatccaggcggcaacacaatccggcaaatactgggccccacatccacagactggggatttngggcc

SEQ ID NO: 456 - DNA, 289 bp, Glycine max
  unsure (1)..(289): unsure at all n locations; Clone ID: 700553863H1
tctnactnttgagcagggctatccanaacnngnngttgttcatctnagatcaccangantatctcatnccatanttgaggaanatacatgcantataccncanagncttatgctacaagaaccatatttntcttgaaaaatcatggaanttgacgccattggccattgagtnaagtangccacatcctcagggtgaagcatatggtcctgttagcgangtctacgtgccttcgagtgaaggagtcgaagctnacatttggttactggccnaggctacgttgtngtgaat

SEQ ID NO: 457 - DNA, 292 bp, Glycine max
  Clone ID: 700553864H1
agtgtcccacgttgttgctttgcaagttgcgagtctctcttcctacgacaaccgtttcctctcgccggaaaaccgacattgatctctctctccgccgatccgtccgccatgagttccggcgagctcctccacatacaaccccaggagctgcagtttccctttgaattgaggaagcagatctcatgctctttgcagttgtctaacaagactgacaactatgtggctttcaaggttaagacaacaaatcctaaagaaatattgtgttagacctaacactggagttgtgatgcct

SEQ ID NO: 458 - DNA, 248 bp, Glycine max
  unsure (1)..(248): unsure at all n locations; Clone ID: 700553865H1
gtgtgtgtnctgttacncttncctttcctcttganttgggttcgggtgacaacacaaanacaaacacgatggtgtgttgatcagtcncttttctctctctttccatttgatgtctctccccancaaacggtcgggcaccgctggttcctccccgtcgccgccaccccctatgaaaaaggccaagtccctnntcctnnannaaaatnatactccgangtngttctggnnncttcnttcaagactctcga

SEQ ID NO: 459 - DNA, 296 bp, Glycine max
  Clone ID: 700553866H1
ggcggggataagattaaagattcaacaatggcctctgcttctgctactcttctcaagtcatctcctgttcttgacaagtgcgagtgggtcaaaggccagacccttcgccaacctctcgtgagatgtaacccttcctcagcatcagctctcaccatcaaagctgcttcctatgctgacgagctcgtcaaaaccgccaaaacagtggcctcaccggggcgtggtattttggcgatggatgagtcaaatgcaacctgcgggaagcgtttggcatctattgggttagagaacacagaagt

SEQ ID NO: 460 - DNA, 293 bp, Glycine max
  Clone ID: 700553867H1
gcagaatgttccccctgctttgcttgttcgatttttgagggagcatcgatcagagtgggctgattatggagttgatgcatactctgctgcatgccttaaagctagtccctatgcagttccttgtgcaagacctggtggcttccccagcacccaggtcattttaccccttgctcatactattgagcacgaggagttcctggaggtagttcgaatagagggtcatgcattttctcccgaggatgttgcgttggcacgtgatatgtatctattgcagctgtgcagtggagttgatg

SEQ ID NO: 461 - DNA, 293 bp, Glycine max
  Clone ID: 700553868H1
caactatccgagaagaacaaatatgtcgtttcacgtctgatagcaaagagagattccgtggtaatgctggagttgttgtgacaacatataatatggttgcttttggtggtaagcggtctgaagaatctgaaaagatcattgaagaaataagaaacagagaatggggattgctcctcatggatgaggtgcatgtggtaccggcccatatgtttcgtaaagtcattagtatcactaaatctcattgtaaacttgggctcacagctacacttgtcagagaggatgaaaggattaca

SEQ ID NO: 462 - DNA, 291 bp, Glycine max
  unsure (1)..(291): unsure at all n locations; Clone ID: 700553869H1
aataaagcttttcgaagaacaggcacgtgaagcagttgcaacttctggaactcataaagctgaactggaggagagtctcgtaaaattaaagcatcttgaaactgtcattgaggatcttcaaaacaagtcactccatcttgaaaaagaaactacagggctgaatgaagagaactcaaagcttaatcagngaatagctagctatgaatctaaattaagtgatttacaggagaagctctctgcagcacttgttgagaaggaggaaacagttaaagagctactcaccttgaagga

SEQ ID NO: 463 - DNA, 291 bp, Glycine max
  unsure (1)..(291): unsure at all n locations; Clone ID: 700553870H1
caagcgaaganaaagcgctttctaacttaagtgatggcgaacgcagctgaagtttcagccttgaaccgcatcaaactgcatcttttgggtgaactctctccactggccactcccctaaactattttgatgaatcaaaccctagcccctctgaatcttccaattcccaatcntcttctgtttctcttaaccactacttcactgacctcttcgaattcgactccaaaccccaaataatcgacctccaaactcccaaaacactaacttcagctcagaagaaacctcaattgaat

SEQ ID NO: 464 - DNA, 290 bp, Glycine max
  unsure (1)..(290): unsure at all n locations; Clone ID: 700553871H1
caaattttctaagcctttgttcatttttcatataattaaacttttatattattagtaaaagtataacttttttgtatttgggttcttcattttaccttattatatttaatttaaagttccagtatgggtttaagcttaaaagtnacttttttttgtcgtttgcnttanccaaagtaaaagggtnttcatatcngaatttggattccctttgtncatttttctacatattcacacatttagtaacttgaaccataggataaaaaattagatgactcatatntgtatcttag

SEQ ID NO: 465 - DNA, 293 bp, Glycine max
  unsure (1)..(293): unsure at all n locations; Clone ID: 700553872H1
caagcacaagatgttgttgtggctgttcctgaagatnngaaagtggttcaaggtntttctggtgatgttganagagacagagatttggcanttgncgacgaatctgtgcttgccaatttatcacctgaaacacnatctgataaaaccagccaagtnttggaagacaaaacacagtctgattatntaagtgataatgagantgctgtgcaaacaagaaagcaggnnatacaganagatttgaccagagatagttcnctagctcccaaggcattattgagaaagtcttctcgatt

SEQ ID NO: 466 - DNA, 292 bp, Glycine max
  unsure (1)..(292): unsure at all n locations; Clone ID: 700553873H1
attgaataganatagaatcgtcgattttctctttctctgactctagggtttcattatnttccttctgtagatccatctatctagcttcggagctgcaaatggacgtcgcagtcactgccttccggtcaccgctgatcatcctccgaagaccggtcaacgagtctgcctcagctcggttcggttccacttttgggttttccagaaagcaacggttcagttcagtatgtatccccaaacacaagcacaagcaaggtcgtagaagagggtttgtagttagagcttctgcatcctc

SEQ ID NO: 467 - DNA, 287 bp, Glycine max
  Clone ID: 700553874H1
cttcaaaacactcataacacaaagcacaaagcaaagctcatccttgagttaaaaaatggcagcagcttcttccatggctctctcatccccatccttggctggcaaggccgtgaagctgggcccatcagccccagaagtgggaagggtgagcatgaggaagaccgtcaccaagcaggtctcctcaggaagcccatggtacggcccagaccgagtcaagtacttgggcccattctctggcgagcccccgtcctacctaaccggtgagttcccaggcgatacggctggga

SEQ ID NO: 468 - DNA, 284 bp, Glycine max
  Clone ID: 700553875H1
aaggaagttgtggagaagggtcatggtgacttaaaagataagccttggtggcctaaactgcagactgtggaggatctcattcaatcctgctctattatcatatggacagcttcggctctccatgcagctgttaattttgggcaatacccttatggaggttatatcgtgaaccgtccaactctagccagaaggtttatcccagaagaaggaaccaaagaatatgatgagatggtgaaggatcctcaaaaggcatatctgagaacaatcacacccaagttcgagac

SEQ ID NO: 469 - DNA, 286 bp, Glycine max
  unsure (1)..(286): unsure at all n locations; Clone ID: 700553876H1
cagaaaaacaagtagttgagaactaagaagaaggaaatggcttcctcaatgatctcctccccagctgttaccaccgtcaaccgtgccggtgccggcatggttgctccattcaccggcctcaaatccatggctggcttccccacgaggaagaccaacaatgacattacctccattgctagcaacggtggaagagtacaatgcatgcaggtgtggccaccaatnggcaagaagaagttcgagactctttcctacttgccagacctcgatgatgcccaattggcaaagg

SEQ ID NO: 470 - DNA, 283 bp, Glycine max
  unsure (1)..(283): unsure at all n locations; Clone ID: 700553878H1
gcagagaagttaacaaccaatggccaccatcattgcntcttcctcatccactgtgctcnnctctgcatcctcttcctacctcctcccatttncacacccttctacntcgcgcctttctttctnnnnnnnnnnnnnnnnnnnnnnnnnnnntctatcaatttctccttctttnttatntacacntcttcaaattcnacacactttgccactcatgctgccttcagcatcagtgccagcgccgccgagaagaagaaggtgctcatcgtcaataccaacagcggcg

SEQ ID NO: 471 - DNA, 286 bp, Glycine max
  unsure (1)..(286): unsure at all n locations; Clone ID: 700553879H1
tgggatttggcttgatcttagaaaaatctatgtttcttttgttttgaattcaatactcagtgctttgattgtgcattttgcatcagaagcaggcactgctgagtcacagtatggaggccaaaagctcaaaccagataaaagaggaaagcaatgattccaattatgataggnaagctgaaataaaagtctttgatgattcaaaaactggtgttaaaggtcttgtagattctggtgtgaaaaagatcccacgcatgttcctttccggcatcgacataactgaaaaacg

SEQ ID NO: 472 - DNA, 286 bp, Glycine max
  unsure (1)..(286): unsure at all n locations; Clone ID: 700553880H1
gggaaggaagggataattgagtgtgtggtgtgtagngtggcagctccgtcagcgtgagatggacgccgcagcaacaggttcggagctgaacaagtccggaagcggaggttcggagcgaagtgaggacagcggaggagggatatttgagtactctggctgggtttatcacttgggagtgaattccattggccatgagtactgtcatctccgattcctcttcattaggggaaagtatgtctccatgtacnagcgtgatcctcacganaaccctggcctcaaacctatt

SEQ ID NO: 473 - DNA, 293 bp, Glycine max
  unsure (1)..(293): unsure at all n locations; Clone ID: 700553882H1
gttggaaagtggaaatgcaggagagccagcaaaactgatcaggcagagataccgtgaagccgcagacttgatcaagaagggaaagatgtgtgctctcttcatcaacgatcttgatgcaggagctggtcgtcttggtggaaccacccaatacactgtcaacaaccagatggtgaatgccaccctcatgaacattgctnataaccccaccaatgtgcagcttcctggtatgtataacaaggaagagaatccccgtgtgcccatcatcgtcaccggtaacgatttctccacactct

SEQ ID NO: 474 - DNA, 290 bp, Glycine max
  unsure (1)..(290): unsure at all n locations; Clone ID: 700553883H1
agagtttgttgtgagctataagctagtttatcgtgaggagaatatgaagttgtttgttttctttgttgctgcagtagttttggtagcatgcccatgccatggcgcaggctaccaaaggttccctctccgaatgaaaactggctatggtgagcgttcttcggaggtaaaatgcgcaagttttaggcttgctgtggaagcacacaacatccgagcctttaaaaccattcctgaagagtgcgttgaaccaacaaaggactanttaatggcgaacaatttagatcagactctaa

SEQ ID NO: 475 - DNA, 293 bp, Glycine max
  unsure (1)..(293): unsure at all n locations; Clone ID: 700553884H1
tcaacttgtatcttaagaactgaaatcgcacattcaccctgaacagcatttcaaattttaaaattagagatcaaaataaaacaaaaaaattacaagatataccaccataaaaaaagtatatactttttgccttgaaaacttacaagatataccaacattaaaaaaaagaaaaagtatatactatatgtacaaggtcactcccaaagtactggtttttccttaaaaacaaatggtaaatcaaaacaattaccgcnacacattactgtttccacctcccccaagtgcnaccatgg

SEQ ID NO: 476 - DNA, 289 bp, Glycine max
  Clone ID: 700553885H1
gtttccatcagagctcaagtcaccactgaggcaccagccaaggttgaaaaagagtccaagaaacaggatgaaggtgtggttgtgaacaagtttaaacccaagaccccttacattggtagatgcctgctcaacacaaagatcactggggatgatgctccaggagaaacttggcacatggtcttcagcaccgagggagagattccttacagagaaggacaatcaattggggtaattccagatggtattgacaagaatggcaaacctcataaactgagattgtattctattg

SEQ ID NO: 477 - DNA, 289 bp, Glycine max
  unsure (1)..(289): unsure at all n locations; Clone ID: 700553886H1
cttctaatgacgacaacaccagtcacgatgatggagtacctgaaaantcagatcctcataaagttgatgaaccacacactcaggaagtagatgaaacttgtgataataaaggtgcgaatgacaatcttaagactactaaagggacagctgatggtctaccagctgtgaaacagtgctgcaaaacaaacgtgcctgcatgtaattttagtgacaaagtggaacagaagtctattgataagttaattgaagaagaattcaaagaattgggagacaagaataagaggtgctt

SEQ ID NO: 478 - DNA, 289 bp, Glycine max
  unsure (1)..(289): unsure at all n locations; Clone ID: 700553887H1
cacaattctcccttcanagtttcaatggctgtttcaaccagcttctcgggtgtaaagttggaggctttgttgctganatgtggttcctccaatgctgccaccaccaccactcatatatcatgttttggcaaaaacagaaagacacttgttcagagtcagagaggggctattcgttgtgaggcttctnctgcttctgatgttgtggctgatgccaccaagaaagctgctantgtctctgctcttgagcagcttaagacctctgcagctgataggtatacnaaggaaagga

SEQ ID NO: 479 - DNA, 289 bp, Glycine max
  Clone ID: 700553888H1
cacaattctcccttcaaagtttcaatggctgtttcaaccagcttctcgggtgtaaagttggaggctttgttgctgaaatgtggttcctccaatgctgccaccaccaccactcatatatcatgttttggcaaaaacagaaagacacttgttcagagtcagagaggggctattcgttgtgaggcttcttctgcttctgatgttgtggctgatgccaccaagaaagctgctagtgtctctgctcttgagcagcttaagacctctgcagctgataggtatacaaaggaaagga

SEQ ID NO: 480 - DNA, 285 bp, Glycine max
  unsure (1)..(285): unsure at all n locations; Clone ID: 700553889H1
cgagtnagtactgagtagggtttcaaatttccaatcggnatcggaaaaaatgggcggcggcggcggngatcacggccatngacanggacacggcgatttcaggaanaaggtctggagtatgngcggtggccctnactgccgtcccaagcactgnaagcgcaacaccnnnattnccatggtcggcgtcgntctcanctgcatccccancgctatgaaatccgcncaantcnagcaacggccacatcancctgtncgngccatcccttctcaactctggtgcaagaa

SEQ ID NO: 481 - DNA, 287 bp, Glycine max
  unsure (1)..(287): unsure at all n locations; Clone ID: 700553890H1
gtgagtagcagctagcaatggaaattactgccatggcttcttcagctactcctccacgaccttctcttccaacttccttccacttctccacacacagtagtcacnaccaccttnagcaaacctcaactcagacgctctcacatagcactaccaacttcaaccaccatttcattgctcgctctctttnctcctncnnacgangccaaagccgctgtcagcatcgccaaggaccagattgtctcttctctcacccaagtggagaaaacgctggatcaggttcaggaaat

SEQ ID NO: 482 - DNA, 282 bp, Glycine max
  unsure (1)..(282): unsure at all n locations; Clone ID: 700553892H1
gatcactgccttaatcggattcagctgttgttcctcctcctcaatttcgtattggatgattttaaagatgatcccggtaggctttgaatgtgaatattgaaaggctttagttgttgattttggtcaagtctctagtcaacctgtgaattttntattcaagtttaaaaatatanagagcaagacnttttgtttttcgaggaacaagagcagatattgaaaatgggtttccaggatttatacctgagaggcgagcattgcgcgttcatgcaacacgnccctagt

SEQ ID NO: 483 - DNA, 285 bp, Glycine max
  Clone ID: 700553895H1
catcacaaagaaaacagagattcgcattattagcagatcggactcaaccgatgaagttgaagccgcagtgaaacaaaccagaataattgacgcatcatcaattagatcgagctgctagaaatgaaggatgaggacgggcttccgacgaccgccgccacgaagaaggaaagcatggattcgagtctgtttgggaaagggaggtacaaattctgggcgttagcgggccatcttgcttctggcgttctggtccatgttcaccggcaccgtctcgctccgctggtccgg

SEQ ID NO: 484 - DNA, 287 bp, Glycine max
  Clone ID: 700553896H1
acgagtttctctatctgctttcttcacaaagagtaactcagtcttctaaaaactttctcaaaaccattattattctctaatctttcgtttcttcaattaattaattggtttcttgctatggctgtggactctgcgatttcgtccccattgggtcccccggcctgtgagaaggacgcaaaggcgttgcggttcatcgaagaaatgactcgcaacgccgacgccgtccaggagagagtcctggaggagattctcacacgcaacgcccagacagagtaccttaaacgctt

SEQ ID NO: 485 - DNA, 300 bp, Glycine max
  unsure (1)..(300): unsure at all n locations; Clone ID: 700553901H1
ccggtgtcttgaaacctggaatggtggttacctttgcaccaactggactaacaactgaagttaagtctgtggagatgcaccatgaaactctcactgaggcccatcctggtgacaatgtgggattcaatgttaagaatgttgctgtcaaggatctcaagcgtggttttgttgcgtctaactctaaggatgaccctgccaaggaggctgctaacttcacatcccaagttatcatcatgaaccaccctggacagattggaaatggctatgcacctgttcttgattgccacaccncccacatnc

SEQ ID NO: 486 - DNA, 300 bp, Glycine max
  unsure (1)..(300): unsure at all n locations; Clone ID: 700553902H1
cttgcatcctctttctccgtatgaacatcaaccattatcaatgacctcatcttggttccctaagttaaagatgtggccaccattctgcattggaagctataggggccatgcttagaggtnngtgnanctgcnatnnagaggcctagccaccttcatcaccatatgnnnnnnnnnnnnnnnnnnnnnnnngaaactatgaactgcgtttatgcatgtcggaaaatcttcttttgataagagtttggaaatcctcttgtaacaaaattttcattattcaaccttgatctttatataaaaaaa

SEQ ID NO: 487 - DNA, 299 bp, Glycine max
  Clone ID: 700553904H1
ctcattagagagtgatatttttgttcccacatatgatggaaatatggccaaagtggttgagggccaccgcagatatcttgggttcaagaaaacgattttgttgaacagaaaactcctagtcgaattgatagatcaatacaataatggagtgctgaactgggatgaattctcttcagcagtgaaggaagcccatgccaatcgcatgggtagccaaaccaagaggtttgtaatccctgacaagccaaaagaagaggattatttctatgccaacccacaggagtgtttggaaccatcagcat

SEQ ID NO: 488 - DNA, 295 bp, Glycine max
  unsure (1)..(295): unsure at all n locations; Clone ID: 700553906H1
gcggcgcgctcctattatcaccgtagacggcggaggtggcggtggtggtgtagacacggcgtgacggcgatctcttgagataaatgttggttgannnnnnnnnnnnnnnnnnngttgtattgtagaatgagccaaccaacggtgatacttgccactgcgagctatgatcacactattcgtttttgggaggccaagagtggccgttgctaccgcaccatccaatatcctgattcgcaagtaaaccggctgganataaccccggataaacgcttcctggctgcagctggcaatccac

SEQ ID NO: 489 - DNA, 283 bp, Glycine max
  unsure (1)..(283): unsure at all n locations; Clone ID: 700553908H1
tttgggttcaaagtgattgctgactccttatttcctagttccgtctttcctntgcacaacacagcatacaccttcgcctatagctantctctcttccttcaattcaattcctcaatnctctagctcttatggaaactcaacaccaacaacccaccatcaagtctangttcagacgcatctgtgtctactgtggtagcagccctggcaaaaaccctagctatcagctcgctgctattcagctcggaantcaactggtggagaggaacattgacttggtttatgg

SEQ ID NO: 490 - DNA, 293 bp, Glycine max
  unsure (1)..(293): unsure at all n locations; Clone ID: 700553909H1
ggcagcgcgaanttgggagcaccgtttctcatggcggttccaacatcggaaagcgantccgtagagaacagaacactcctttcacagttttactctcactatctcgtaaaccgaatcaagactctctatccctacttctccacaaatttcttcnnnaacttngctctcngcttcagatcaangnngcgtnggnaatgnntccntctncggtnacntncttntnaattggattttccggggttatgnccnagaggtncnnangggnntgatgttgtggnggntatnttagggcg

SEQ ID NO: 491 - DNA, 279 bp, Glycine max
  unsure (1)..(279): unsure at all n locations; Clone ID: 700553910H1
cttaaaagaatattttggcagaaaaaactcccgcgtggatctttgctcatttgaacttcgatggcganttcggcgagggtgacaagcggtggatcgtggctgagcgccccgacggcaccaacgtgcacaactggcactgggccgagaccaactgcctcgagtggtccagaacctttttcaacaacagtttcaccaacgtcgccgtcggtgacggcgatgccactgtcacgatcaagaaggtggagaagctcgacggcgaggcctatgtcaacgtccgca

SEQ ID NO: 492 - DNA, 288 bp, Glycine max
  Clone ID: 700553911H1
tttcttctattttctgttcccaatttgtttcggatctctgttcacgaaccctaaatctgacgttaattcaccatgatctgaacacaacgtggttcccatctgatccactgcatcgtctttctcaattgtcgaaagatgagtacaagtggttaatgagattgacgaacttgcgttgtttgagcgaaacaaagcagagatgtacctgaaggagccgctatggagtgaaacagggaaaggcgatggaagtgcaaaaacagaggattatggtgcagtgagtgaggtcgtgaa

SEQ ID NO: 493 - DNA, 290 bp, Glycine max
  unsure (1)..(290): unsure at all n locations; Clone ID: 700553912H1
ttcccaattcctaattgtttaaacctaattctcatttcttcatcgttcgattcttctcctcctaaagatgcagatcttcgtgaaaactttgaccggtaagaccatcacccttgaggtggagtcctccgacaccatcgataacgtgaaagcncagttcaagacaaggaagggatcccacctgaccagcagagacttatctttgcgggtaaacagcttgaggatggtcgaacccttgccgactacaacattccaaaaggaatccactctccacctcgtgcttcgcctcaggg

SEQ ID NO: 494 - DNA, 291 bp, Glycine max
  unsure (1)..(291): unsure at all n locations; Clone ID: 700553914H1
gaaaatcccccctcctcttcccaacgacgctgtcgcctcgtgagaacactattttgncctatttaacactanaaaacgccgtcgttttgtcctaaaacccgatccggtagacacgtactcccatagctaattgtgagaatttcggtcncctgttttatttttttattttgcctttttcggttgccctctctttaaatgctccctcctattttttttgttctctctctcgttttttgaagacgaacattaaacaaccgtgaagaagcagttaaagcaaatgcgaaacgctga

SEQ ID NO: 495 - DNA, 299 bp, Glycine max
  unsure (1)..(299): unsure at all n locations; Clone ID: 700553915H1
gctcctcctaagtcctaacctaaacttctttccacacaacatacgaccntnncattctcaccctcccattcacacatcactcacaaatcccattgnccattatcccttncctcaatcacaaaaaagcctctcttatatctcattanntctccgcttgcaatcaccaaaggcaaaaaaaataaaggggtacgttaacgatgaagcgcgctttctccgtcgacaccgcggaggataacaaaaacaacaggaacacgaaaaagacaaagcttgattcggaagaggaagaggaacacgggaca

SEQ ID NO: 496 - DNA, 293 bp, Glycine max
  unsure (1)..(293): unsure at all n locations; Clone ID: 700553916H1
ttccacaagaactctccaancatcctccttcccacgagattctttggtgggaaaaatccaagaggtttgaaatttgaaggcagggaagatggattatttcaatgcaccaggaagaaaccatctctttgttccagggccggttaacattccggaccagatcatccgggccatgaacagaaacaatgaggactaccgttctccagcaattccagctatgacaaaaactttgcttgaggatgtcaagaagattttcaagaccactactggaaccccattctcatccctacaatggt

SEQ ID NO: 497 - DNA, 288 bp, Glycine max
  unsure (1)..(288): unsure at all n locations; Clone ID: 700553918H1
ctggtcgccttcgccacggggcttctggtttccggctccaccatcgtcgtgcncctccaagttcgagatgcacgacatgctctcctcgatcgagaggttccgcgccacttacctccngctcgtgccgcccattctggtggccatgctcaacaaggccgccgctatcaagggcaagtacgatancnacgtcggtganattcggtgcttccggtggggctccgttgagcaaggangttatagnggntttggggcaatttcccaagtcaccatcctnnagggttangtttg

SEQ ID NO: 498 - DNA, 268 bp, Glycine max
  Clone ID: 700553919H1
tcaggggtttcagctggcccgttgctgcctacagagaactcatcaacggcgacctcattgccaaggatgtctagataagagagggtggatggctacattggaggaaagcctggagaatttgtatgtggatgggatctttacgcgctctttttgtaattactttttttataaatggtacatgatatgatgtaatctaatgcatgtgaaccacaatcaacctcatcttccaattcaattaatgtaagaagagttcttgctacactctctc

SEQ ID NO: 499 - DNA, 288 bp, Glycine max
  unsure (1)..(288): unsure at all n locations; Clone ID: 700553920H1
ctcttttgctgcatcagaggagttgtaaattaagagcatggctgcacaagctcttgtatcatcatcttctcttaccttctcagcggaggctgcaagacaaagtcttggaccaagatcactccaatctccatttggcttctccagaaaagcctcctttcttgttaaggcagctgctaccccccctgtcaagcaaggatcagacagacctttgtggtttgcatcanagcaaagtctttcttacttggatggcagccttccgggtgactatggatttgaccctctgggact

SEQ ID NO: 500 - DNA, 294 bp, Glycine max
  unsure (1)..(294): unsure at all n locations; Clone ID: 700553922H1
gatgtagatcaagtatccaagcaacatagatcnntcccctgttgaattaccgagcctaacancagtccatggaagatgantctctgaaaaaganagataacagcattgcagaacaccataaatcagagttagcttcaattctaacccaaagtgaggactgccagctgcagccccatccccagcctgagcctgaccaggagcctccttctcttatttcttttgaaacaacagaaacctctgctcaaatagaagttatcagacaaccttctcctccacctgtacttgctgaagtac

SEQ ID NO: 501 - DNA, 293 bp, Glycine max
  unsure (1)..(293): unsure at all n locations; Clone ID: 700553923H1
gcggcgaagaagcaggacncccggggacaccaaaaagagaaagcgactcaatactgaagctcccaaggcttcgaagctcgttgcctcaaagaagcacaaaccagactccgttgctaaagacaacaagaacaagaagacggcccctcttaccggccgagaacgtcgtcttcatgccaaggaactagcagatgctagaaaaaagaagagaaagcgacatttcactcttgagcaagagcttgcacgtctgtgggaaaagatgagacgtcacaagattgctaaagaggacagagcta

SEQ ID NO: 502 - DNA, 283 bp, Glycine max
  Clone ID: 700553924H1
attaagtactacatattagctttccctgaattcaaatcttcttctcatctcacaccccactgtcacctgtattcacaaagctcaacaaaaattataacaatacacaaagaagggaaaatacgaatcagaagacagagatatctatcaggactgaaaaagcaatttagaaagagaaatccgaagatggaagacttagaagcaaagatatcagattcaaaaccagatgactcaagtcctctaaaactctacttgctcccttttcttgctccgggacacatgatcc

SEQ ID NO: 503 - DNA, 287 bp, Glycine max
  Clone ID: 700553925H1
cctccggcggcgaaacggcttcgttctgcttcaggtcgaaggagttggttgaactgacgaagatgtgcagagatctgaggcacaaggtgccggagatattggaggtggaggtggatccgaagggaggaccgaggattcaagaggcggcgatgaagctctacgtttcgaagagcgcgttcgagaaggttcacttgttgcaggcgatgcaggcgattgaggcggcgatgaagagattcttctacgcgtataagcaggtgttggcggtggtgatgggaagctccgaggct

SEQ ID NO: 504 - DNA, 287 bp, Glycine max
  Clone ID: 700553928H1
tcgtcatgaaaaagccccttgttgattcttttgtcatcaatcatggtgggaggtattggctttttgggtcagatcatagtggttttggcacccagaaaaatgggcagttggagatttggtatagcaattcacctcttggtccttggaatcctcacaagaagaatcccatttataacattgataggagcttgggagctcgcaatggaggcaggccatttaaatatgaaggaaatctttatcgtatgggtcaggactgtggtgatacatatgggagaaagttgcgtgtt

SEQ ID NO: 505 - DNA, 290 bp, Glycine max
  unsure (1)..(290): unsure at all n locations; Clone ID: 700553929H1
ctcttcttctcttgcggctngggttttagcgcagcttncttctagatttaaggaagatgggtaaggaaaaggttcacatcagtattgtggttattggccatgttgactctgggaattccactaccactggccacctgatctacaagcttggaggcattgacaagcgtgttattgagagatttgagaaggaagctgctgagatgaacaagaggtctttcaagtatgcctgggtgcttgataagcttaaggctgagcgtgaaagaggaatcacaattgatattgccttgtgg

SEQ ID NO: 506 - DNA, 291 bp, Glycine max
  Clone ID: 700553930H1
tttttgctgacacctaaagcatctagcagcttatcaaaatggagactaaccatacagcaaaacggtgttgtaggactttagtatgcatttgatcaggagcagctaggaagcatttttacaattacaaagtttgaccactcattgttctgatcactgagtaaataatttctttttagatgcaaacttctaagaagcacccaacttcagctggtatccatttatacctgcagcctgcacaagatattgatccttacactcattaccaaatattgcaaagcaattcatgccatg

SEQ ID NO: 507 - DNA, 279 bp, Glycine max
  unsure (1)..(279): unsure at all n locations; Clone ID: 700553931H1
ctcgaggtaatccacctcgcatgtccncaacatcatcggtcatgtccgaagatcctgagaagcagataactggagccggcgataaaaggaacagttaatgtgttgaaggcggcgaaggaagcgggggtggagcgcgtggtggcgacttcgtcgatctcatccattatgccaagccctaactggccagctgataagattaaggcagaagagtgttggacagaccttgaatactgcaaacagaaggggttgtactatcccattgcaaagactctagcagag

SEQ ID NO: 508 - DNA, 296 bp, Glycine max
  unsure (1)..(296): unsure at all n locations; Clone ID: 700553933H1
caaaaacaactttgcaatttcgtaggagatgctcaggagcagcacgctaacacagagtgttacagtcacctgtgttcgtccacagtcacagacaatggttccaatcaattcccgtaaattatagattctttgacgctgctcggaactctctatcatcacccaactccgcgatntcaaatggaaaagaaaggccaattataaccgtcatagttctggaaggggactttcacatcgcgcgtttggcaangcgnttnngaacgccgacgaactcatcgactccgtcgagacatttatct

SEQ ID NO: 509 - DNA, 91 bp, Glycine max
  unsure (1)..(91): unsure at all n locations; Clone ID: 700553934H1
gtctacctctacannggtagnagatnttaatagcttccctagccggngaccgtactccatacactttcctgatgcaacacttttgagggac

SEQ ID NO: 510 - DNA, 300 bp, Glycine max
  unsure (1)..(300): unsure at all n locations; Clone ID: 700553935H1
ggccctttcagtacgaagatactcgccctcttctccactggatctgctcncaatcttcgcccctccaacgtccnctactctcggagaactcaaccagtatgagcagttccagcaagaagggaagctgttagagggcgagganttggactttgcttacgacagcatctctgcattcgctgataggagagaactntcaggaggccgttttggcacctgggnnggtgtaaanatttatcantggaggcgactttggcgtatagngangnggctttggccttgcagaggcagctgangcatctg

SEQ ID NO: 511 - DNA, 295 bp, Glycine max
  unsure (1)..(295): unsure at all n locations; Clone ID: 700553936H1
cacatccatctttgccttctgcatgttggttctctgtaaacagatactgcaaaagaagaataatattgaatatttggttgggttgaatccctgggttgangcgttgcagacatcacggctattctaagantgtctcnctctctcattcatgtcccaactgtacgtnggaggacaggttgcgtaactgccaccaacccttcgccgcacggtgggcgtggtgctttgccttctgaaggtggtagcccttcagacttgctcttcttagctggtggtggttctgctgtcttctagcttc

SEQ ID NO: 512 - DNA, 293 bp, Glycine max
  unsure (1)..(293): unsure at all n locations; Clone ID: 700553937H1
gccaagtatactaaatgtcttagtcttaagaggggggaaaaactggaattccaatgattcttaattnnntacaatccaatctgcaaactgagtgagatatataacttgtttttgatttcttcctcatcattttgcatatacaaagattaaatcggaagggttttntggaaattgcntcaatatgattttgctgatgttgtgcttcaccaacttgagcatagctttgctcaaagtcatatgaatggatttggagancagccactggccaagattgccattcacaagaccgtttt

SEQ ID NO: 513 - DNA, 290 bp, Glycine max
  unsure (1)..(290): unsure at all n locations; Clone ID: 700553938H1
tttgcattggatcttgtaatgaatagtgatggcacttgccaaggagtgattgccttgaatatggaggatggaacactacatcgtttcaaagctgcttcaacaattttggccacagggggttatggtagagcatacttctctgcaacctcagcacatacttgcactggagatggcaatgccatggttgcacgtgctgggatccctcttgaggatttggagtttgtacaatttcacccaacaggtntatntggagcaggttgccttatcacagaaggatctcgtggtgaagg

SEQ ID NO: 514 - DNA, 290 bp, Glycine max
  unsure (1)..(290): unsure at all n locations; Clone ID: 700553939H1
agtagttgagaactaagaaggagaagcaaatggcttcctcaatgatctcttccccagctgttaccactgtncaaccgtgccggtgccggcatggttgctccattcactggcctcaagtccatggctggcttccccaccagaaagaccaacaatgacattacctccattgctagcaacggtggaagagtgcaatgcatgcaggtgtggccaccagttggcaagaancngtttgagactctttcctacctgccagaccttgatgatgcacaattggcaaaggaagtagaata

SEQ ID NO: 515 - DNA, 289 bp, Glycine max
  unsure (1)..(289): unsure at all n locations; Clone ID: 700553940H1
ctcagttgttccatttcatgccaattatccactgtctactcaaacccaattgttagttccttccaatcttagttactcctttgctacaacaggaaccagaaagttcaagtctttccagctcaaggctggattttgggaatcaattaaatctgggttgatgaagaataactccatgcaagtcattgatccaccctctgcagatgaagaagacgaagaacctctgcctcaagagtttgttcttgtggaaaagacagaacccgatggtacaattgancaaataatattctct

SEQ ID NO: 516 - DNA, 287 bp, Glycine max
  Clone ID: 700553941H1
gagtgaagaaatggcgcaagacttggcattggatttggaggagcttcgccgcctccacagcatcgccaaaagacctcgaaccctctctcttctctcctccgaaattcgtaacctcgaaaagttatcgtcagaggaagcttctgcgcagattccggcgccgatttcgaccggaactaaagtggcgccttcacctgcgctgaagtatgcggcactcgcgtcgttcagttgggaccaggatagtgacaaagttaagatatatgtgttaatggagggaatcgatgagaata

SEQ ID NO: 517 - DNA, 286 bp, Glycine max
  Clone ID: 700553942H1
gcactacaggaaatgcatggaagagaggttcaaggaattagtggcaagcaaaggtctagatgctgtccaaactgaggtcaaggatatggactgggagagcaccttccacttgcgtcacctccctgaatcaaacatctcagagatccctgatctcattgatgagtacaggaaggtgatgaaggattttgctttgaggttagagaaactagcagagcagctgctggacttgttgtgtgagaatcttggcctagagaaagggtacctcaagaaggctttctatggatca

SEQ ID NO: 518 - DNA, 288 bp, Glycine max
  Clone ID: 700553943H1
tacccctcaaagaaaagccaccttaacatctcttctctgaaaattctctttagagagatagagagaggaagaaagaatggcagcttgcactgtctactcaacacaatctctgagcacaaattgctccatctcaaccccatcaaagacgcaactcagttttttccaccaaaagcaggtagttttctggaggaacagcaagaagggcagctgcagcagcagaagaagctatgtgataacatgtgcagcaggtgactcacagacagtggtgattggcctggctgcagactc

SEQ ID NO: 519 - DNA, 287 bp, Glycine max
  unsure (1)..(287): unsure at all n locations; Clone ID: 700553944H1
ctctctttcccggcgcatgtgccggattagacgccaactgcttccataattcacctcctccaaccaaccaacacaagatttccctctggattggatggaggaagcatgtgaatttcgaagttgggctgaattgattcctgatgcgctcggggtaatcttcaccaatctttctcttcaggagagggtaacagtgatccccagggtgtgcaaatcatgggctaatncagtaactggaccttactgctggcaagagatagacatcaaggattggagcaacntnttgccag

SEQ ID NO: 520 - DNA, 288 bp, Glycine max
  Clone ID: 700553945H1
caagactgtggctctgacaaattttgatacagagagattacaaattattcttgaaaacgagattcctgttgtaagcaatcaggtgcaacattcacttgttgatatgcgtccccaacagagaatggcagagctttgtcagcatacaggagtcaaactgataacgtatggaacagtaatgggtggtctgttgtcggagaagttccttgacaccaacatatctattccttttgctggtcctgcaataaacaccccctccctccaaaagtacaaaaggatggtagatgcttg

SEQ ID NO: 521 - DNA, 292 bp, Glycine max
  unsure (1)..(292): unsure at all n locations; Clone ID: 700553947H1
cttgttcgtcaaggattaaagaatgaccttaaaagtcatgtntgntcngcatgtttatggtctcctttatcggtccgacagagaatacagggnggcgatcaagtgctatcgaaatgcactgagaatagatcccgacaatattgaaattcttcgtgacctatcactcctacaggcacaaatgcgagattngtcaggctttgttgagacaagacaacaacttttgactttgaagccaaatcatcgcatgaactggattggattttctgtagcccatcatttgaactctaattca

SEQ ID NO: 522 - DNA, 294 bp, Glycine max
  unsure (1)..(294): unsure at all n locations; Clone ID: 700553948H1
gttacgagtcagcaagagagaaatatcttgttgagttgatttctgatcccaaattgagtttgagtttcagccatggtatctgtttctctgctcttattcctatctttctttgccttctttgcaccctctgaatctcacgacaaagtctcgttggaattgtnctncgaaagcttatgcccctacagcgccaacttcatcgtgaatcacctcccaaaaatcttcaccccagatcttgccccaatcgttcacctcaaactcgttccttggggcaatgccaaactccgtgccaacgcc

SEQ ID NO: 523 - DNA, 289 bp, Glycine max
  unsure (1)..(289): unsure at all n locations; Clone ID: 700553949H1
cctcaacccaacccaatcttcaccttcgcccacaacaaatcccattcctgcatctcctccttcagcatcgctgcaaactttactttccatttttgtccttcctccccgagaaaaaaatggcgaggcagcatntggtatggccgtccatgatgactgcaagctaaagtttttggagctcaaggggaagaggacgtaccggtttatcgtttttaagatgaggagaagcagaagcaagttattgtggagaagctgggtgagcctgcnatngggctgngngtggttntatttt

SEQ ID NO: 524 - DNA, 294 bp, Glycine max
  unsure (1)..(294): unsure at all n locations; Clone ID: 700553950H1
cgactgcgcttcacgatgggtgcttacaagtatgtttcggagctatggcgcaagaagcagtctgatgttatgagattcttgcagcgggtgaggtgctgggagtaccgccagcaaccttctattgtccgtttgacaaggtctactcgcccagacaaggctcgccgcttgggtttcaaggctaagcagggttatgtgatttaccgtgtncntgnacgaaggggtggccggaagagaccagttccaaaaggtattgtntatggncaagcccaccaaccaaggtgttactcaatgaat

SEQ ID NO: 525 - DNA, 294 bp, Glycine max
  Clone ID: 700553951H1
cctgttgtaaccataacttgaaagatgatatactgcgcttatatcaaccggttcatttactagttggaactccaggaagaatattagatcttaccaagaaaggtgtttgtattctgaaagattgcgctatgcttgttatggatgaggccgataagcttctgtccccagagtttcaaccatctatagagcagctgattcattttcttcctacaacccgtcaaatcttgatgttttcagccacatttcctgttactgtaaaggattcaaagacaggtatcttcaaaagccttatgt

SEQ ID NO: 526 - DNA, 289 bp, Glycine max
  unsure (1)..(289): unsure at all n locations; Clone ID: 700553953H1
tgagctataagctagtttatcgtgaggngaatatgaagttgtttgttttctttgttgctgcagtagttttggtagcatggccatgccatggcgcaggctaccaaaggttccctctccgaatgaaaactggctatggtgagcgttcttcggaggtaaaatgcgtaagttttaggcttgctgtggaagcacacaacatccgagcctttaaaaccattcctgaagagtgcgttgaaccaacaaaggactacattaatggcgaacaatttagatcagactctaaaacagttaa

SEQ ID NO: 527 - DNA, 286 bp, Glycine max
  Clone ID: 700553955H1
ttactccctatattaacccaacaatgcaaaacaacacactgaactctcttcactgaaacgacacacacaaaaaaaagctttagtttaggatgacccaagtgaggaacaagcaagtggttctaagagattatgtcaccggattccctaaagaatccgacatgaacattgttgaaggcaccataatattgaaggttccagaaggttccaatgatgtcctctaaaaaatctctacttgtcatgtgatccatacatgcgactcctcatggccaaggaccgttctttcgga

SEQ ID NO: 528 - DNA, 287 bp, Glycine max
  Clone ID: 700553956H1
ctccctttcactctcgtagacatcacaaaccttccctccattcatcccacgcatggctgccatgaactctagcgtattggcctgtagctatgccatatcaggtgcagcgtgttcggagctcaatgggaaggtcacttccgtggcctatgttgcatgctctggctacaagttgccattgatcaaagctgaggccagagttcctaaagccaaagaatctgaaggaggaaggagaggtgcccttgttctcttggcagctacccttttcacctctgcagcttccaattctt

SEQ ID NO: 529 - DNA, 286 bp, Glycine max
  unsure (1)..(286): unsure at all n locations; Clone ID: 700553957H1
ctttccttccatagaaaggaatcaagatttttcccaataaactatgggtgacatctcacaaatcacctgctgattttgctgccatttcgagaggggacgaacgagacagcaacatatcatctccgaccaaatcccgttcattcaggcagtgttcatttctctgcccctcacttacttattcactccnaactccaaaaccatcatcgtcaatatggcacaagcacacgctctattttctcctntcaatcctcgcnttcttccttcttcctcccccattctccgacgc

SEQ ID NO: 530 - DNA, 285 bp, Glycine max
  Clone ID: 700553959H1
tttaccccattttctctaaatccaaacaggccccaaaagaaagagagggaaaattctcttccatggcctcttcacgccctgccaatgtgggaatccttgccatggacatctacttccctcccacctgcgtcacccaggatgctttggagggtcatgatggggtgagcaaagggaaatatactattgggcttggacaggattgcatggccttctgctctgaggttgaagatgttatctcaatgagcttgacggtagttacttcacttcttgaaaaatttaatgttg

SEQ ID NO: 531 - DNA, 287 bp, Glycine max
  unsure (1)..(287): unsure at all n locations; Clone ID: 700553960H1
cccgagtcatgcttgtgttcaacgaagacagccacaggcgnagcatgttattgatggcttcctcactcaccaaccaccaaaccacaccgtcgcacccattccatcgctgattcctccaatggcttccactaccaccactttctctctttctctccgcaccaaccaacaaactccattccccaaaccctctttcttctccaataacaaccatctgcatttcaactctaataattgggcctggacctctgtttccactgctcgcaagtcaaggatatgcgtcattcctc

SEQ ID NO: 532 - DNA, 287 bp, Glycine max
  unsure (1)..(287): unsure at all n locations; Clone ID: 700553961H1
cgccgacgtggcgatggtccgaatgcaggccgacggccgcnctccctccggcgcacggcgcaactacaagtccgttgtggacgccatcacgcgaatggcgaacaagagggcgtcactagcctgtggagaggctcatcgcttacggtgaaccgcgccatgctcgtgacggcgtcgcagctggcttcctacgaccagttcaaagaaatgattctcgagaacggcgtgatgcgcgacggcctcgggacccacgtcacggcgagcttcgcggcggggttcgtggcggcggt

SEQ ID NO: 533 - DNA, 289 bp, Glycine max
  Clone ID: 700553962H1
ggaaggcctaaagcttgatgatgtcccagcaggaatatattcattgaattgcttgcctcttaggttggttcactctgaggcatcaccaattcgatgtattctgatcagatgatccatgatggggtcaaacctggttttcaattgcacggatgaacctgccattagaagcaacgtagccccgaatacaattagtggtgtccataagaagcagtttgatgcaaattgcaagctaagctgatagtagtacgttgaaattactcgtattttacgtccttgggttgtaaactac

SEQ ID NO: 534 - DNA, 291 bp, Glycine max
  unsure (1)..(291): unsure at all n locations; Clone ID: 700553963H1
aaacatttgattaaaaaataacatgaagtgtaaatagagtaaagaataaaataaataatgtaatattaatggaattttataaaattataagatcagtactgtctganaaaatgctagaaaatagtgagataagcttagttatcaaacatctctatttcagtcaaacaaatttataagcttgtcaaatattctagctgaaataactagtcaaacacagtctttgggaaaaaaactgaaaatcaactgttgctctgtttcttcttagccacttaaatgaagtcagggaaatca

SEQ ID NO: 535 - DNA, 294 bp, Glycine max
  Clone ID: 700553964H1
gggagagagttcaacaattatgtggctttccttgctcgaagcaaggttagtattctacatgaggattgggatcatgtagaggagagcgagaagaatatgatttggcaaactatcatgcacaattatgacgttccaaattccaagttcctcaagaagaaactaatttcatatgctggtcaacgttggaggggatttaagacacagctctctagcttttacatatatgggaagtacaaagacaaatctccttgtgataagtatacattcctcaagaaggatacgtggcaaagattt

SEQ ID NO: 536 - DNA, 292 bp, Glycine max
  unsure (1)..(292): unsure at all n locations; Clone ID: 700553965H1
ctagtttcttacaaggctctactctactgcttcaccttctgctctagaaaattcagtggtgatacatggcttcggctactctctctgtagccaaaccagcccttcaggcaaatgggaaaggcttctctgaattctctggcctccgcagctcatcaggcttccttcccttttctagaaaatcttcagaggatttccattctgtcattgccttccagacctatgcagttggaagcagtggaggatacaagaagggtgtgacagaagcaaaactgaaggttgccataaaggnttg

SEQ ID NO: 537 - DNA, 290 bp, Glycine max
  unsure (1)..(290): unsure at all n locations; Clone ID: 700553966H1
catcacgcgataaccatcagaatggttccgttcccgtcaganaacggcgttgaaggagacgacgagaganaagaggaagacgaagaggaagaagangacgangaagangagaanttgnnggaagatgaagaagacgnngaggaaccgaggctcaagtaccagagaatgggaggtagcatcccttcgctgcttgcgagtnacgcggcgtcgtgtatcgccgtcgcgnagncntgatcatctcggcactcacggcggcaccgttnacatcctcnatttctcgggaatcagtt

SEQ ID NO: 538 - DNA, 292 bp, Glycine max
  unsure (1)..(292): unsure at all n locations; Clone ID: 700553967H1
ccaaaattccacagcggancccagttcaagcaaactcaagactctagcctctttattaaggaccgtctcgnnttctcgatagtccgttagtatgctctgcggttgttgaatcttttttagattattcctgaacccttcaaaaccctcttatctctcttctatcgcttggcctgatattctttttggctgagagatcaagcaaaaatgagcgtggttggatttgatttggtaatgagagctgcattgttgctgtcgcaagacaaagggggatcgacgttgtgctcaatgatga

SEQ ID NO: 539 - DNA, 291 bp, Glycine max
  Clone ID: 700553968H1
ctagggttatcatttctccatttccattttctctctcacttttcaagaatcgtaagctatgggaaagtcttacccaactgtgagtgctgattaccagaaggccgttgagaaggcgaagaagaagctcagaggcttcatcgctgagaagagatgcgctcctctaatgctccgtttggcatggcactctgctggaacctttgacaagggcacgaagaccggtggacccttcggaaccatcaagcaccctgccgaactggctcacagcgctaacaaggtcttgacatcgctgtt

SEQ ID NO: 540 - DNA, 282 bp, Glycine max
  Clone ID: 700553969H1
cggcaaagtccttgctggttgcttccattcgcgatggcgttgcaggagaggctagacaagttcaagaaacagcaagagaagtgccaaacgacactttcgaccattgcagctaccaaggccgccgcggcaacccaaaagtccgccacacatgcctcggcaaatggaagaaacgctgcccctgcggttaagttttccaacgacaccgagaggcttcagcatattaatagcattcgcaaggcccctgtgggtgctcagatgaagcgtgttattgatcttcttcta

SEQ ID NO: 541 - DNA, 288 bp, Glycine max
  unsure (1)..(288): unsure at all n locations; Clone ID: 700553970H1
cttcataagaagggagaaacataaganattaccttttcagtctaacattttaatttattcacgctatttttctaagaaaacacttcttccaaagtcttaaactttgcctggctctccattttctcctttctaactaaattctaataattgattagctcaattttactattttacataattttccgaataagaacaacagacatttcaatttttacggcgaaaagtgaaagaaaaagaaaaatcaattatcaaattatcaataataataaaatcggcgtttttgtgaac

SEQ ID NO: 542 - DNA, 286 bp, Glycine max
  Clone ID: 700553971H1
gggccttctacggcttccagatcgccatcgagaacatccactccgagatgtacagcctcctcctcgaaacctacatcaaggactccgaccagaagaaccacctcttccgtgccatcgacaccatcccctgcgtcgctaagaaagcccagtgggcccttcgctggatcgattcctccgactccttcgccgagcgtctcgttgccttcgcatgtgttgaaggtattttcttctctggaagcttctgcgctatcttctggctcaaaaaacgaggatcatgccggggctc

SEQ ID NO: 543 - DNA, 51 bp, Glycine max
  unsure (1)..(51): unsure at all n locations; Clone ID: 700553972H1
ctgctacggagaaagagaagaaagcggcaaacaaagcannannttncncat

SEQ ID NO: 544 - DNA, 282 bp, Glycine max
  unsure (1)..(282): unsure at all n locations; Clone ID: 700553974H1
tgactcagatcctgtgccgattcgatcggagagaaagctagctagatatagcttatagggaatggaattcacaagatgaagttctatgtatctgcaaaggggataaagagagtcgtcnctggaaaaggatccgccaagaccactgctcctgcctacaccgttgccgctcgccggatttccaaccggatggtggtggtgctcggaatcgtattgctgctcagctttgtgagagtggcggttttggtgctggaatcttctgcggtgtgctccacctttgattgc

SEQ ID NO: 545 - DNA, 284 bp, Glycine max
  Clone ID: 700553976H1
gtgattgtgagaaccgtttactgcttcaaaactgatgagagggggaatgagaaggctggggaagtgatgaagaatgctttgaggaaggttcttgtccactattaccctcttgctgggaggcttactataagctcagagggtaaactcatagtggattgcacaggtgaaggtgccttgtttgtggaggctgaggcaaactgttccatggaagagattggtgacatcacaaagcctgaccctgggactcttggtatgcttgtttatgacattcctgaagcaaaaca

SEQ ID NO: 546 - DNA, 211 bp, Glycine max
  Clone ID: 700553977H1
cttgaaaattcattttcgagaacctgcacagtttctttcattttttcttgttacaaggtcatgacaaaagacaacaatggatacctcagtgccctacactggggcaataagaggcaccgtgcataagcctcaagcgaacctaggggcagatcagaagttctcacttggtaggtcgaaaacccgaaagggcggcctaggaaaaattggggtt

SEQ ID NO: 547 - DNA, 287 bp, Glycine max
  Clone ID: 700553978H1
caaaggagttgtaaattaagagcatggctgcacaagctcttgtatcatcatcatctcttaccttctcagccgaggctacaagacaaagtcttggaccaagatcactccaatctccatttggcttctcaagaaaagcctcctttcttgttaaggcagctgctactccccctgtcaagcaaggatcagacagacctttgtggtttgcatcaaagcaaagtctttcctacttggatggcagccttccgggtgactatggatttgaccctctgggactttcggaccctgaa

SEQ ID NO: 548 - DNA, 290 bp, Glycine max
  Clone ID: 700553979H1
gttacagccgcaccttgattcagagcagagcgaccttgaagagctatggctgtcggaaagaataagaggatttccaagggaaagaagggtggcaagaagaaagccgctgatccctttgccaagaaggactggtacgatatcaaggccccttccgtctttcaggtcaagaatgttggcaaaaccctcgtctctcgtacccagggaaccaagattgcttctgaaggactcaaacatagagtgtttgaggtctcattggctgatctccaaggagatgaagaccatgccttcaa

SEQ ID NO: 549 - DNA, 289 bp, Glycine max
  unsure (1)..(289): unsure at all n locations; Clone ID: 700553980H1
ctctaatatttttctcactgtcttgtctctccagagaactgtatagagagagatggcagctgcaacatctggtgctgtgttaaatgggttgggatcttccttcttgagtggaggaaacaggagccaaacccttctggccactgctattggaggcaaannnnnnnnnnnnnnnnnnnnnnnnagtcctagaagactcattgtggtagctgctgctgcaccaaagaagtcatggctccctggtgtcagaggtggtggcaacctcgtcgacccagaatggcttgatggatcg

SEQ ID NO: 550 - DNA, 293 bp, Glycine max
  unsure (1)..(293): unsure at all n locations; Clone ID: 700553981H1
agcgacaaagagagtgccaggtgtgtgaaggagctcgttacttgggatccagttgttgttattcttaatcggagatcgcagcggcggattgcatgagcggcggatcggaggcggtgtgagcagaggnnnnaagatgtctgcgatcatagtgtgcgggaagagatcagcgctgttccaagaccttcctccccaagaggatccgnnnnnnnnnnnnnnnnnnnnncgttcacctctctcctcctccttcttcccnncntccancacntcgccgcccttttccctgacannngaca

SEQ ID NO: 551 - DNA, 296 bp, Glycine max
  unsure (1)..(296): unsure at all n locations; Clone ID: 700553982H1
gcaccaacttataaacnataacgcgattctcnaacgccgttgttgtttcctgaaacttctncaaaacagaagcnacttaagccagcaaagaacaacctttaaaccaattcattcaaaattacgtttcntgcttcgcntcccccacccacaatttgctctcaatttccctgatccctatttanaccaactcacattaaccctcaatttcccaaacgggatcgtgttctctttcagagagcaggtcgccgaagaagtaagaaaaccaatggccagaaaccgaaagcgcggcggcggcg

SEQ ID NO: 552 - DNA, 292 bp, Glycine max
  unsure (1)..(292): unsure at all n locations; Clone ID: 700553983H1
caattgaagttaaaagccttagccttccctacaactccaaacancgaagacatcatcatccatggctgcctccgtctccactgtacggagctgtcaacagagctcttttgaacctgaatggttctggagctggagcttcagctcccagttcagccttctttgggaccagcttgaagaaggttattgcctcaagggtccccaacagcaaggtttccggtggaagcttcaagattgttgctgtagaagagaagaaagagattgaagagacccagcagaccgacaaggacagatg

SEQ ID NO: 553 - DNA, 289 bp, Glycine max
  unsure (1)..(289): unsure at all n locations; Clone ID: 700553984H1
caagcctctctctttctccttcgatcactccaaacccaacccttcttcctccttccttggatccactcgcaagcttcttcgcttcaatgctctcgctaggcctcatgctcaccctcgtnnnnnnnnnnnnnnnnnnnnnnnngttcttctcgaacgaacctccaatctgcttgtcacaaaagaggaagggttggaactctatgaagacatgatattagggaggttttttgaggacaagtgcgctgagatgtattataggggcaaaatgtttggttttgttcattgtaca

SEQ ID NO: 554 - DNA, 288 bp, Glycine max
  Clone ID: 700553985H1
gaggacgggcgcaccctcgccgactacaacatccagaaggaatcaacccttcacctcgtcctccgtctccgtggtggcatgcagatcttcgttaagaccctcaccggcaagactataaccctagaagtcgagagctccgacaccatcgacaacgtcaaggctaagatccaggacaaggagggtatccccccagaccagcagaggctgatcttcgccggcaagcagctcgaggacggacgtacccttgctgactacaacatccagaaggagtcaactctccattggtgt

SEQ ID NO: 555 - DNA, 286 bp, Glycine max
  unsure (1)..(286): unsure at all n locations; Clone ID: 700553986H1
tnaagttctgagtgctatttgcttattgcattgccattgccaagtaatggcgctactacgtcttgtttgcttaacttcaacaaatcagttatcaactcaatccacctctttctcttttcttcgcaaaacaccccattctcaatccatccatatcgatccctcttcctttcactttccacgcctatcccttatnacaaccactctcacacacgcccaacaagccaaccctgttgtcgccgaagaagaattttctcgcaccaggttactcgctcagaacgtgccctgg

SEQ ID NO: 556 - DNA, 285 bp, Glycine max
  unsure (1)..(285): unsure at all n locations; Clone ID: 700553987H1
ctcnactctctcacttctntctatcacatttnacttgcaagatggcagcgtcatcagcatgccttgtagggaatggnttatctacacggggtaatagaatanctctcaagaaggacttcaatggaagntatctctactcancttggagactttcatcatngnacaataaggcatcagaagcnttttccatanagtcttccttggagcnaaggcaacaacaagaagggagnagggggtttctaaaactgttgcttgganatgtgggagntggtttgcctgcactat

SEQ ID NO: 557 - DNA, 284 bp, Glycine max
  Clone ID: 700553988H1
ctcgtgtttccgtttccgtttcaatttcctctcacaggctttaaccttaccagctcgagataagacatggaccggatcaaaggcccatggagtccggaggaggacgaggctctgcagaagctggtggagaaacacgggcccaggtactggtctctgatcagcaagtccatcccgggccggtccggcaagtcctgcaggctccggtggtgcaaccagctgtccccccaggtggagcaccgggccttcacggccgaagaggacgacaccataatccgggcccatgc

SEQ ID NO: 558 - DNA, 282 bp, Glycine max
  unsure (1)..(282): unsure at all n locations; Clone ID: 700553990H1
ttccacgctttcttcagagcctgcacttgttccacccttcaacatacctnctcctcctcttccccaattctcttatccgtaatctggcactcttcagagaagactttgtaagataaaaagagaaatggccttagaccagtattttgatgaggctgtgccccagttggattccttggaagataaatcgtctctcgaaacatggaaatgtggcagtgacgatattgcagattcggatagaaatgcctctggtggctttgattgcaacatatgcctggagtgtgt

SEQ ID NO: 559 - DNA, 281 bp, Glycine max
  unsure (1)..(281): unsure at all n locations; Clone ID: 700553991H1
ctcccctctctctctcaattgagacttattcatttcgtgttctctgcgaattagcatgttccgttcatcgttccgccgcgcgttttcggcgagggcgtcgaagcactgcgaganccacgagttcctctctcggaactcgttcctggggagctgggaggcgccacgggacccgaaggaggcggaggcgaactggcgcggctgcgaagggaatacgcgaacaagtgaaggaggttcggaaggaatacataagagagatggaagcgatgaagattgagaaggag

SEQ ID NO: 560 - DNA, 286 bp, Glycine max
  unsure (1)..(286): unsure at all n locations; Clone ID: 700553992H1
ccgaagccgctcacgttatccacacaacancantcnnncnaaccctaaccaaccatggcttcttccaccttcaccgcaatgtgncccttncaagctttcctcctccgccgacatctcctccttccccacccaccgccgcancaacgccgtccttctgtccagacgcagccgcgccgccagggtctccgccatggccaaggagttgcacttcaacaaagacggcaccgcaattaggaagctccagagcggtgtgaacaagctcgcggatctggttggggtcacgctt

SEQ ID NO: 561 - DNA, 284 bp, Glycine max
  unsure (1)..(284): unsure at all n locations; Clone ID: 700553993H1
atttcctttaacaacttttctggcagcattccaccagcttttcagatncttagaagactcacttggttgtatctccaaaacaattctatatctggagctattcctgacttcaaccttccaagtctcaagcatttgaacttgagcaataataacttgaatggctcaattccaaattccataaagacatttccttacacttcttttgtaggaaattctctcttatgtggtccacctctcaatcattgctctacaatctccccttctccatctcctgccatgattac

SEQ ID NO: 562 - DNA, 268 bp, Glycine max
  unsure (1)..(268): unsure at all n locations; Clone ID: 700553994H1
ctaaaatcaaatcatggccaccnccacatcccaaacccttcgcttccaatctccgtcactcttnctctcctcgaagctccccctctcctccgcgttctccgtctcgctccgccctcgccaccgcggctcccgccctctcgtgctagtcgtctccgccgggctcgacgcgaagcccacggtgctcgtcgccgagaagctcggagacgcggggctgaagctgctcaaggattcgccaacgtcgatgttcctacaacctcagcaccgagga

SEQ ID NO: 563 - DNA, 289 bp, Glycine max
  unsure (1)..(289): unsure at all n locations; Clone ID: 700553995H1
caccacaacactattcttcttcgcagcaatggcgcgagtggatctggacgggaaccccatgaaggcacttacgatctgcatgatcggcgctggcggcttcataggctcgcatctctgcgagaagctcatgtccgaaacccctcacaccgtcctcgccctcgacgtctacaacgacaagatcaaacacctcctcgaaccctccgattccccctgggccggccgcatcaccttccaccgcctcaacatcancacacgactctcgcctcgaaggcctcatcaagatggcaga

SEQ ID NO: 564 - DNA, 290 bp, Glycine max
  unsure (1)..(290): unsure at all n locations; Clone ID: 700553996H1
gcactctgaatgtttcaccatctcttttagaagctanaaatgggtagaggaagagcgtttgccatagcaaaacaatttaaagagagtccgcatagatgcttctcagtttcctaaggccggctttctctaaggcggcgatgaatacgaagttggtgcatgtgaaaacaaagggaaaccaatggcttttattcaagtgaggacaaaagaagttcatagaatggatntnttnngatcaatctttcctcanaattaacaccactgtttgataccgtaccatgcctgcacctcag

SEQ ID NO: 565 - DNA, 292 bp, Glycine max
  Clone ID: 700554001H1
ctttgttattttcatgctgacaaatcttggtaccgggcaatggttgttcaacacaccccgaggaccagttgaatcccccaacgacttgttcgaagtattctacgtcgattatggaaatcaagaagtagtaccctacagtcaactacggcctgttgtccatctgtgtctgcggcacctggtcttgctcaactgtgtagccttgcatacatcaagattccaaacttggaagaggattttggccaagaagcagctgaatatttgagtgaatcatttaaacagtggaaaagagttc

SEQ ID NO: 566 - DNA, 286 bp, Glycine max
  unsure (1)..(286): unsure at all n locations; Clone ID: 700554002H1
acaaaacttatcaaaatctcatatactgattcagttctatacataaccatcganatttactatcaaaccaaaaattctccaaaatctcttcacctctgtgatgaccatggaatacagaaccttagaactcaacatcatatccgcaaaggacataagaacgttaacctcttctccaagatggacgtatacgccgtcgttacgctctccggcgaccctctccaccctcagggcgccaccacccagtccacaaagacgcggcagcaaccccagtggaatacccgtgaaa

SEQ ID NO: 567 - DNA, 98 bp, Glycine max
  unsure (1)..(98): unsure at all n locations; Clone ID: 700554003H1
tcntcntgctcttgcggctagggttnatagacgcnctctgcttgctagatttaaggnagatnggtacggncaaggnntcacatcagtnttgnggtcat

SEQ ID NO: 568 - DNA, 221 bp, Glycine max
  unsure (1)..(221): unsure at all n locations; Clone ID: 700554005H1
accatactacaaggagttccanttttggggggganannaagatcngtgggggtgtaaatgtgtaagtttgtgctgttttgtttgtggggattgttttcttgagaaaagagtaagcggtgtgtgtggtgtgaaaaagtgtgttaatatgagtaactggttggggttctctctgactccacacttgaggattgatgaagaatttgagagagagaaccaagagc

SEQ ID NO: 569 - DNA, 284 bp, Glycine max
  unsure (1)..(284): unsure at all n locations; Clone ID: 700554006H1
cacaattctagatggagtgaaaattatgatatacattgtangnctaaaagtacacgaaactaacattactggtccaaggaaaagatacatcagctacacatacaaagcagattaatgaaaaggggcattcagatcctttcttcagccaactggtacatgcattgacagctagtggatactcataatcataacactagtatgtacttattctacagttatcagatgagctttcaantaatctaatcaccaaagactaatatattagtttcgtgtacttttaggcc

SEQ ID NO: 570 - DNA, 281 bp, Glycine max
  Clone ID: 700554007H1
ctggcagccaaaattggcctcattttagttggaggatggctggctacactctgtgttgctggttacacggctatcgcagttagaaaagctgtgaaaacagaattggtagatgctgagcctatgggaaagcctgctccattttcttctcttaagtgtggacttggactgctgttctccttatatcatttgtatctgcattattttaccctacagcactgggtacaagtgccagaacagccttccattttgcttgcagccacagtgttaggctacaggttggc

SEQ ID NO: 571 - DNA, 287 bp, Glycine max
  unsure (1)..(287): unsure at all n locations; Clone ID: 700554008H1
tgtatactgggaagaagaagacaattgaagctgttcagaggctaaaattgaattttcctgcaatncccaatctacgccagagctcgtgatctcaagcatcttttagatctgaagaaagcaggtgcaacggatgccattttggaaaatgcaagactagcttgcacctgggttctaagttgctgaaaggccttggtgtgatgtctgatgatgtggcatttttgagtcagcttattagagattccatggagctccaagctcaagaaggaatcggccaatctggatgatcg

SEQ ID NO: 572 - DNA, 282 bp, Glycine max
  unsure (1)..(282): unsure at all n locations; Clone ID: 700554009H1
ggttctgatgctccaaaagacagctgggatcttgaaaaactaactgcaaaaattcagcaatattgctacttgttgaatgatctatcccctgatttgctggggaacacatgttcagattacgaggaattgcggaattatctccgtcttcgggtcgtgaagcctacctgcagaaaagggatattgtggagcaacaagcagcaggcttgatgaaagaagcagagcggttcctaatcttaagcaatatcgatcgcctgtggaaagaacatctgcagcataaanttg

SEQ ID NO: 573 - DNA, 282 bp, Glycine max
  unsure (1)..(282): unsure at all n locations; Clone ID: 700554010H1
tcntcttctcttgcggctagggttttagcgcacttcttctagatttanggaagatgggtaagganaaggtncacatcagtattgtggtcattggccatgtcgactctgggaaatccactaccactggtcacctgatttacaagcttggggcattgncaagcgtgttattgcgaggtttgagnaggnagctgctgagatgaacaagaggtctttcaagtatgccgggtgctggacaaacttaaggctgngcgtgnaagaggaatcaccattgatattgctttg

SEQ ID NO: 574 - DNA, 280 bp, Glycine max
  unsure (1)..(280): unsure at all n locations; Clone ID: 700554012H1
ctctatactataggtctcgcccaatacctactctccgctcccaagagcacgcaccaccactantgcacttcttcctcgnnnnnnnnnnnnnnnnnnnnnnnngctaaacccttttttctatctcactaacacaacaatgggagacgagagaagggcaagcctgctgcttccggcgtgtggtccaccatcaagcctttcgtcaatggtggagcctccggcatgctcgccacctgcgtcatcaacccatcgatatgatcaaggtgaggatcaattgggcaag

SEQ ID NO: 575 - DNA, 283 bp, Glycine max
  unsure (1)..(283): unsure at all n locations; Clone ID: 700554013H1
caaaggttgctgtaggagataagattgcagtagtgctaagtgctaacacctgcagtgaacaatggcctctgcatcagcatctctgctcaagtcttcacttgttcttgacaagtctgagtgggtgaagggacaaacccttcgccaacctctgcatcagttgtgagatgcanccccaccaccccatcaggcctcaccatcagagctggttcctatgctgatgagctcgttaagaccgcgaaaacagtggcttcaccagggaggggtntttggccngggatgagtc

SEQ ID NO: 576 - DNA, 288 bp, Glycine max
  unsure (1)..(288): unsure at all n locations; Clone ID: 700554015H1
taacaaccatatctattcttacaagttacatccattgagaaacatgaaggtctcccccttagcattttcaatcctttttttgtccttcaccatagaactcttcattggcattgcttcagcagcacaagaaccagtgcttgacacctcagncagangctgagaacaggtgtcaagtactacattctaccagtcttcagaggcagaggtggaggcctaacagtttcaagcagtggcaacaacacatgccccctctttgtggtgcaagagaagcttgaagtcttcaaaggg

SEQ ID NO: 577 - DNA, 288 bp, Glycine max
  Clone ID: 700554017H1
tgcagtcccatcttcaattgttcatcaaagtacaaactcttcattcaatggtcaaacattacacctgccgtgtttaaggttacctgtgctaagacaaaatactcccatgcacatgcctgttatcatgatggtcaaaccaaaaatacagttctccagggaactgatgaacaaacaatacccgatgtgaggctgaccaaatcaagggatggaacaaatggcatggctatcttcacatttgatcaaccctcagttttcgattcttcgggtgaaataggcgatatcatggga

SEQ ID NO: 578 - DNA, 237 bp, Glycine max
  unsure (1)..(237): unsure at all n locations; Clone ID: 700554018H1
ttcgtccttcacccttacaangcaacaacataacgttgctaattgcttgcacttcctcttatggttgcttcctttgtttctcattagctgttttggtttttgtcttagttctacacctttcctcatntcccgcagtagcaactgcgaaccaatctctctgagaaaaaaaaaatggcgtcgaacgggaatggcagcgttgcgaacgggaacgggaccgctaggaacggactggcgaag

SEQ ID NO: 579 - DNA, 263 bp, Glycine max
  unsure (1)..(263): unsure at all n locations; Clone ID: 700554019H1
atcttttcttactcgttcaggcaaatagcaactgcatacggcccttgcggaancaacagggattacattttcctctagaaaaggccatgcatgatattggtaagttatctccttaacatacacatacantgcagtcaaacattattctttgcatgacacgagcttcgcatttatattttgatgtgcaggccatgaggatgacttggtgatagagcttgccaatgaagtgaagaaagtacttggagtgggaaatgtagtaccaa

SEQ ID NO: 580 - DNA, 280 bp, Glycine max
  Clone ID: 700554021H1
ggctttctttattctctccttcctcttccttcttcttgtttcatctgccactgcttgtgatcgctgcttgtatcaatccaaggcttcctatttctccaaagcttctgctctttcatctggggcatgtgggtatggctctttggcacagacataagtggtggacaccttgcagctggtgtggattctctcttcaaaaatggagcaggttgtggtgcctgctttcagataagatgcaagaacccaactctatgtagcaaagaaggtaccaaagtggtatgac

SEQ ID NO: 581 - DNA, 283 bp, Glycine max
  unsure (1)..(283): unsure at all n locations; Clone ID: 700554023H1
ctgagtcttgcaattgaagttgaagtcttgcccttctctcttcaactccaaacacaagacattcatcatccatggctggcctccgtctccactgtcggagctgtcaacagagctcttttgaacctgaatgggtctggacctggggtttcnctcccagttcatccttctttgggagcagcttgaagaaggttattggctcaagggtccccaacacaaagatttcctctggaagcttcaagatgttgctgtagaagagaagaaagagattgaagagacccagcag

SEQ ID NO: 582 - DNA, 286 bp, Glycine max
  unsure (1)..(286): unsure at all n locations; Clone ID: 700554024H1
caatgcttcacccggcggcactgatagcatcgtgtccttatccttatccttatcctgggcggcatgagttaccctcagcctcagcgtcannancagccagagtcgctgttccaatgccaaatctgagaggcaaagcggttgttggtgtggttccagaatgataaggtgcatggctaaccccagaagagttcaaatggtggccaagcaaattaggagagagctttctacatatgcttctgcaccgataaagtcttgcagtatgctgttcttcccgaagcctccttag

SEQ ID NO: 583 - DNA, 281 bp, Glycine max
  unsure (1)..(281): unsure at all n locations; Clone ID: 700554026H1
ttnatccgctaaggtaaaagagggtggttatgattacaaggtcaatgaaactgtcaatgttgtgctctcagaagacaacagancttggncaaaggacatggggtatgatgaaaggngtcatggcattggcttcacagaaggttgaggattcgctagagataacccgaattggacgtctgataactggacaacgaaatgaaagtgcatagaaatggtttctaccaggagttcaatcgagagaatatggccggaatctctaccagagaaggacaacatcttca

SEQ ID NO: 584 - DNA, 270 bp, Glycine max
  Clone ID: 700554027H1
cttaaaagaatattttgggcagaaaaaactcccgcgtggatctttgctcatttgaaattcgatggcgaagttcggcgagggtgacaagcggtggatcgtggctgagcgccccgacggctccaacgtgcacaactggcatgggccgagaccaactgcctcgagtggtccagaacctttttcaacaacagtttcaccaacgtcgccgtcggtgacggcgatgccactgtcacgatcaagaaggtggagaagctcgaggcgaagctatgtcaa

SEQ ID NO: 585 - DNA, 283 bp, Glycine max
  unsure (1)..(283): unsure at all n locations; Clone ID: 700554028H1
ttcatctcacattctcactctcctcaattctntttcttttctcttctctcttcttcaacttcattcaaaactttcacctttctctctcttcacaaacggtgccggaaaagtccattctttttctcaattccccggcaaaacaaatgtacccactttctagaacctcgccgtgtgccggaaagttcactcctttctcacttttccgcagcaatgtcaatctctcgacggagctttcatgaacacgcaactctccaagcacacttcgatcttcggcctccgtctc

SEQ ID NO: 586 - DNA, 281 bp, Glycine max
  unsure (1)..(281): unsure at all n locations; Clone ID: 700554030H1
gnagtgaccccaatatacttagccatatctttacttcccaaaacttgctctacaatgagtttccttcgttcttttgcaagaaacaaggatatatcaaaagtaggacgcagaggtatccattgcatgcagaaactatgtgcagaaaaatatctcctgattcactagagaaggcccaaaatcgtgtgatagatgctgcactcacacttgttcgagaaaatacaaggcttaagaaagaatcgtggcatagtttgggaggtgctgtggcaattcaatcttcttgg

SEQ ID NO: 587 - DNA, 285 bp, Glycine max
  unsure (1)..(285): unsure at all n locations; Clone ID: 700554031H1
ttcattcccactaaacaaaaaaatanagaaaantttaccaaaatgccttcttcttccacnaccattgtnactnnnntgcgtgntnccaccccgaccagaaatcaaacatgaaacccttgatnctctctgtttctgaccttccaatgttgngtgtcactacatccaaaaggggcgtgttactaaccgctccgccctcgtctttcgaggatatgatactctcttttaaacactctctttctatcgcgctctctcatttccggctcttgcgggaaggttagagacaga

SEQ ID NO: 588 - DNA, 285 bp, Glycine max
  unsure (1)..(285): unsure at all n locations; Clone ID: 700554033H1
cttttctcttctctgtctaaggggtgccctgagatcacattgaaccaatggtgaaggctgtggccgttcttggcagcagtgagggtgtcactggaactattcacttcgttcaggagggaagtggtccaaccaccgtaactggatctcttgtggtcttaagcctggtctccatggtttccatgtccatgccttgggggacactaccaatggttgcctctcaactggatcacatttcaatcctaataacaaggagcaggtgcncctgaggatgagaatcgtcagctg

SEQ ID NO: 589 - DNA, 280 bp, Glycine max
  unsure (1)..(280): unsure at all n locations; Clone ID: 700554034H1
agaaattcttcgttacacatattatcaccagaatgaagacggaggatggggactacacatagagggtcatagcactatgttttgtactgcactgaactatatatgcatgcnaatgcttggagaaggacctaatggaggtcatgacatgcttgtgctagagcaagaaagtggattcgagatcatggtggtgtaacacatataccttcatggggaaaaacttggcttcgatactcggtgtatttgattggtgcggaacaacccaatgcccccagagttttgg

SEQ ID NO: 590 - DNA, 280 bp, Glycine max
  Clone ID: 700554035H1
agaagaacaagtagttgagaactaagaaggagaagcaaatggcttcctcaatgatctcttccccagctgttaccactgtcaaccgtgccggtgccggcatggttgctccattcactggcctcaagtccatggctggcttccccaccgaaagaccaacaatgacattacctccattgctagcaacggtggaagagtgcaatgcatgcaggtgtggccaccagttggcaagaagaagtttgagactctttcctacctgccagaccttgatgatgcacattgg

SEQ ID NO: 591 - DNA, 282 bp, Glycine max
  unsure (1)..(282): unsure at all n locations; Clone ID: 700554036H1
gcacgcaggaggaggagattgatcgagagaagagaagatgactacacgcttcaagaagaacaggaagaagagaggccacgtgagtnccggccatggccgcatcgggaagcaccggaagcaccctggaggacgcggtaatgccggagatggcaccaccaccggatcctctttgacaagtaccaccctgngttcttcggcaaggtcggaatgcgctattttcacaagctccgcaacaattctgactctccgatcctacaacatcgacaagctctggtccctggt

SEQ ID NO: 592 - DNA, 275 bp, Glycine max
  unsure (1)..(275): unsure at all n locations; Clone ID: 700554037H1
ggcaatgacacatccgatggcagtgcactaactgcaatattgatatggaaagtttactctctgaccagaaccgaagcattgccacacttgccattactactctattgaagacaggnaatgaatcaagtgtggaccgtcttatgaanagattacaaatttcatgtctgatattgctgatgagttcaaaattgttgttgttgaagcaataagatcatgtgctgaaattcccttaaaatatagatctctgatgaattcctaagtaacatcttagggaa

SEQ ID NO: 593 - DNA, 276 bp, Glycine max
  Clone ID: 700554038H1
atctttcttctctctctgtgtgtgcgcttcaacggcaaccagaagcagccatggccactgcaaggactgtgaaggatgtttcacctcatgagttcgttaaggcgtactcctctcacctcaagcgatccggcaagatggagctgccgagtggactgatattgtgaaaactgcaagatttaaggagttggctccttatgatcctgactggtactatgtcagagctgcttccatggcaagaaagatctactgagaggaggattggtgttggtgccttca

SEQ ID NO: 594 - DNA, 270 bp, Glycine max
  unsure (1)..(270): unsure at all n locations; Clone ID: 700554040H1
tttctctctcccttagtcaaagggactcgttgttcttctcccaggttatttagannagcaaaatggtgaagatttgctgcattggtgctggatatgtggggggtcctactatggcagtcattgcacttaagtgccctccattgaagttgctgttgttgatatctctaaatcccgcattgcagcctggaacagtgaccagcttcctatctatgaacctggccttgatggtgttgtgaagcaatgccgtggcaagaacctcttcttcagcac

SEQ ID NO: 595 - DNA, 279 bp, Glycine max
  unsure (1)..(279): unsure at all n locations; Clone ID: 700554041H1
gcatcgaaaggagaagatatgcggtactttgatgtattttcaagtcgcttctgtgtcctctttgaagagttgacgccaattcatagttgaatgtgcataatcaaagccaatccaaacacgcacttactctctgtccaggtgggattggtganaagaccccccttatgggagtttgagtagtttagccattttgaaatttggacctcggtttagaattttantancaatgtagcaatggnagaaagcagagcggnatgagaaaatgtgacaaaaagtcaa

SEQ ID NO: 596 - DNA, 266 bp, Glycine max
  unsure (1)..(266): unsure at all n locations; Clone ID: 700554043H1
catcacttactggaagccttgttgtgagtnagaganaaggcttcctgcaccnngcataccaacttgatacctctgannctttctttgcttagaattccacagaatatggagaacgttcttttcaatcactcccacctttggaattcaagggtttgagcaaggaggaggaagactcattgctagggcaanatnaaatatggaggtacatgacatgcttcacggactccgtggccttgaaagctgtcatagagcttcgtatagcggac

SEQ ID NO: 597 - DNA, 278 bp, Glycine max
  unsure (1)..(278): unsure at all n locations; Clone ID: 700554044H1
tncagaagangcattaaaagaagcccagtgagaggtaggaagggaagaagtgttagtagaagccccgtgagcactcacaatacatggaagtatcagtagaagccctgtgagatctcgtgatcatagaagtggcagtgcaagcttgtaaaatccctttctcagggccgtcgaaggagtttacccagagcaccttcgcgaagatacaatcagcagaagtcccgtgaaatcacatggtcatagaattctcagtagaagccctgtgcagatcagtggtcata

SEQ ID NO: 598 - DNA, 282 bp, Glycine max
  Clone ID: 700554049H1
tggtacagtgtcagggctttggttttgggcaccaacaagggagcttgcacaacagattgagaaggttatgcgagctctaggtgattaccttggtgtcaaggttcatgcttgtgttggtgggaccagtgttcgtgaggatcagcgcatctccaagctggtgtccatactgttgttggcactcctggacgtgtgtttgacatgctacgaagacaatctcttcgcccagatcacataaaaatgtttgttttggatgaggctgatgaaatgctttcagtggtttca

SEQ ID NO: 599 - DNA, 281 bp, Glycine max
  unsure (1)..(281): unsure at all n locations; Clone ID: 700554050H1
aaatttcttatggctctgngcgggttctatgctgagcctgtgcaaaatttggagtcatattgcatgccatcaagtgagaacatagacaattactcttcctctgataacagcagccaaacaacctacccttcagtccaaactttaaacaatattgcacccttgaatctgcttccacaggcaacagtttcncctaaccaaaattctccacctgctctcagtttctcatctaacaatagtccatgtcaaagctagagtcaaactccatatgtgttaaggccaca

SEQ ID NO: 600 - DNA, 270 bp, Glycine max
  unsure (1)..(270): unsure at all n locations; Clone ID: 700554053H1
tagacgtgaacagccttcacaaaatgacgagtgtgatagtagatnaagatggcctggtggtgtttatggaaggcaagattgtatttcagagattgattctaggaattgcagggtcagggactggtctgttgatttctctgcgcttgtgtcaaccttgatanttccagaatgccagttgataacctttcacagaggagtcatcaaatgagatgccagccattgaattcagagagcactcaggagaaatgttgctggggacagcagtatata

SEQ ID NO: 601 - DNA, 279 bp, Glycine max
  unsure (1)..(279): unsure at all n locations; Clone ID: 700554054H1
gggtgttaccaaacacagacacaacacaacacagtgctctgttgctanttntacttgccggcggcacctacttcaccgagaagagtgttccaacacaacacaacantngccaaaatgacaatttcaccctctctgaccttaacaccaccaccccgagaatcaccgcaacaacccacacttcccacacttcccacacttcccancccanctatntcaaantcaatcctatttccagaccttcccctctacgcgcnttcntccccctcacatcagcgcccc

SEQ ID NO: 602 - DNA, 278 bp, Glycine max
  unsure (1)..(278): unsure at all n locations; Clone ID: 700554055H1
gcaaaactaaagcccaaaaacccataccaagatgctcctccgaagccactgttgctacctcggcatantccgccgggctagcagtgttcctcgcaacgacgtcgngncgccgacgcgcaatcctgcaacggcatcctcgtctcatagcctacaccggcggcctgcggttgccgcccaacgtctccgactcggctaagcagccgtaccggttcgagtcgacggtgaggttctcaacaaggcctcgacgagctcaagtcgtggaaggtcttcgttgggtt

SEQ ID NO: 603 - DNA, 278 bp, Glycine max
  unsure (1)..(278): unsure at all n locations; Clone ID: 700554057H1
caagtctttaattctcgaagacattccaaaccatggaaccacncacttccatatgtaactcctgggtttacaattcaaaacactacaagactgatcgcatttnctttgccaacaatacatatcnncccaagcnagacaccggcncacttgtcaagtacagagaagaagaattgaagaatgtaagaggggatggaactggtgagcgcaaggaatgggataggatctatgattatgatgtctacaatgacttgggcgatccagataagggtgaaaagtat

SEQ ID NO: 604 - DNA, 273 bp, Glycine max
  Clone ID: 700554058H1
ctagtatccgatcctctgtcctctcgaagctttcatcgttcaacatattctcaccatctcagtccatgggcctgctatcttgttttaggtctaccgtcctgagaaaatgttccaaaggaagctctggcatgtcaagattccttatacgaacaattttcaacgaaacttgatttcgtctggtggcaatgaatcgtattatgggtattttaacaggagatccatacacttcactttatatgggaatggaatgtgggtgggatacaagtgctagaa

SEQ ID NO: 605 - DNA, 267 bp, Glycine max
  unsure (1)..(267): unsure at all n locations; Clone ID: 700554059H1
catcacttactggaagccttgttgtgagtaagaganaaggcttcctgcaccnagcacaccaacttgatacctctgattctttctttgcttagaattccacagaatatggagacncgttcttttcaatcactcccacctttggaattcaagggtttgagcaaggaggaggaagactcattgctagggcaagtggaaatatggaggtacatgacatgcttcacggactccgtggccttgaaagctgtcatagagcttcgtatagcggac

SEQ ID NO: 606 - DNA, 278 bp, Glycine max
  unsure (1)..(278): unsure at all n locations; Clone ID: 700554060H1
acagaagangcattanaagangcccagtgagaggtaggaagggaagangtgttagtagaagccccgtgnagcacttcacaatcatggaagtatcagtagaagccctgtgagatctgcgtgatcatagaagtggcagtgcaagcttgtaaaatccctttctcagggccgtcgaaggagtttacccagagcaccttcgcgaagatcaatgcagcagaattcccgtggaaatcacatggtcatagantctcatagaagcnctgtgagatcagtggtcatag

SEQ ID NO: 607 - DNA, 271 bp, Glycine max
  unsure (1)..(271): unsure at all n locations; Clone ID: 700554061H1
ttgctcgaggttcttatgggattgaaagaatccccactcctcgtattcccatctccagctacgacgtatccgacacttgtacgaggatcttgtcggctnantagcgtggggacaatgagaggtgtcaggagttggttggaagattaaggtttggggtaganntagtgagaggaacaagaggtgcatagttggtgctggtgctggtgctgttcttgcatatgccttgatgtttctcaagtaatctattgataagcagtggttgttttggagg

SEQ ID NO: 608 - DNA, 191 bp, Glycine max
  Clone ID: 700554062H1
gagaaagaaaagaatggcaaagttaataaaattctttgagttgaacacaggggccagattccttctgttgggttaggcacttggcaagctgagcctggtgttgtagccaaagctgtcaccacagccattctggttggatacaggcatattgattgtgctcaagcgtataacaatcaagcagagattggttc

SEQ ID NO: 609 - DNA, 232 bp, Glycine max
  unsure (1)..(232): unsure at all n locations; Clone ID: 700554065H1
tgaangtgtacccaagggatctcaaaccggtgctggaaaagttaaccaccaccgagggtgctattactgttggtcaaaagtgattttgatttggttaattaaacagatagatacatcatcggtttaaataaagaaataatataattataagaaatttatatattacttaatatagaatattgacgatgatgtatcatttcatctgtgttagtttaatttacgttgtctgtat

SEQ ID NO: 610 - DNA, 260 bp, Glycine max
  unsure (1)..(260): unsure at all n locations; Clone ID: 700554067H1
cttcttacaaaaccttaggtcagatttctgggtttgtcttttctgataatcangagtggagctaagtcaagatgccgtgggtttccttgtttgtggatcacaaaagaaattgtgttcgcttggtggtgtttttcgtgtgattctgtaatttaattgctcaggtgtagtcccattaggttgcaaagcaactcttttcattagctgttctcctttcattccaaagctgttagggggatgaggatgtacttgcaataacaata

SEQ ID NO: 611 - DNA, 273 bp, Glycine max
  Clone ID: 700554069H1
tgcaattgaagttgaagtcttgcccttctctcttcaactccaaacacaagacatcatcatccatggctgcctccgtctccactgtcggagctgtcaacagagctcttttgaacctgaatgggtctggacctggggtttagctcccagttcatccttctttgggagcagcttgaagaaggttattggctcaagggtccccaacacaaagatttcctctggaagcttcaagattgttgctgtagaagagaagaaagagattgaagagacccagca

SEQ ID NO: 612 - DNA, 275 bp, Glycine max
  unsure (1)..(275): unsure at all n locations; Clone ID: 700554070H1
gtttgggatgcgaaaagaaaaggttggggtagaagggactgaatccagtggtagatgaggtgaaatgagagcattggtgagagttgagagagagtgagttatgttatcaatgttatggtgaaagtgaaaccacaagcaagctgaaagagaagctattcagtgattttgattcagatcgtgtctgtgtctacaaccatgtacagcggctccagcgnacggcgaaagccatggacgctcctacaaaatcagaggaaantccgcctgcatcctccatg

SEQ ID NO: 613 - DNA, 270 bp, Glycine max
  unsure (1)..(270): unsure at all n locations; Clone ID: 700554071H1
ggcagaagcatatcccagtactagctagtagtttcacatctctcaatagcagtgaattgttatcaagaacagctaccaaaccatctaccagtgttggtggcaaggaaaaacttagtgataagaaaagtttgcctcttcagcatcatcaagtcatcttatagggaatcccttcctgaaagtgccaagcttcctttttacgatgtcaaacgatttgaatcttccaaaagtgtaatacgcccntggagatgagaagagctgacacccaggcgt

SEQ ID NO: 614 - DNA, 183 bp, Glycine max
  unsure (1)..(183): unsure at all n locations; Clone ID: 700554073H1
ggcttttgagggcgttggtngtaagaatggntatccatntccacatgctcctcangttccatttcttgcttnttctttatcantactgnccgcagtccctctctcaaccaccatctgtcttcnattattcggcttgtaaggatggccatacaactgtggaacactttccggcatcttctatcc

SEQ ID NO: 615 - DNA, 262 bp, Glycine max
  Clone ID: 700554074H1
ctctgattctctccatatattatctcaaacccctctacacagaatgggaagtgactggaggaatgactatggtgcatacacttatgagaatcttgagagagagccttactggccatcagagaagcttaagtttccatcactggtgctgggggttttatcgcgtcacacatagctcggcgcctcaagacagaggggcattacattatgcttctgattggaagaaaaatgagcacatgactgaggacatgttctgtgatgattc

SEQ ID NO: 616 - DNA, 271 bp, Glycine max
  unsure (1)..(271): unsure at all n locations; Clone ID: 700554075H1
gttccctcagacatatntgtaacgctgcttcttctgtgaggcatcaatggagacaaaagctttgtccttcgctctgtctntcaangacctcaccaacaaccgcttcacttccaatacgcncacatgctgccgccaaagttccgtctttaccgtcagatgctcttcttcgggtagtggngagnggccttggaagaattcagatgctagacttgtgcttgaagatggttcaattggagagcaaaatcgnttggtgcttcagggacccaattgg

SEQ ID NO: 617 - DNA, 270 bp, Glycine max
  unsure (1)..(270): unsure at all n locations; Clone ID: 700554076H1
agaaatggcgatggcaatngcgcttcgcaggctttcatcttcaattgacaagcctctgcgccctctcttcaatgccggtnccctctactacaagtcgtctntgcctgatgaagctgtttacgacaaggagcgacccgagttacatggccgaagcagttgaatgctccacttgaggtcgtggatcctgagattgctgatattattgagcttgagaaagctaggcaatggaaggggctagantgataccgtcagagcatttcacctctgtgt

SEQ ID NO: 618 - DNA, 256 bp, Glycine max
  unsure (1)..(256): unsure at all n locations; Clone ID: 700554077H1
ctccactctctttctctagtcctgttatttctcagcgcgtaaancatggctnanttggtggagaaaaccacgagtggtcgcnagtacaaggtcaaggacctttcccaggccgacttcggcgcctcgagatcgagctggccgnggttgagatgcccggcctcatggcctgtncggaccgagttcggcccctcccagcccttcaagggggcccgcatcaccggctccctccacatgaccatccagaccgccgttctca

SEQ ID NO: 619 - DNA, 270 bp, Glycine max
  unsure (1)..(270): unsure at all n locations; Clone ID: 700554078H1
attggcttcttatgaaagtcttgagcagcttcatcgctttgtgtttgttcttggggtcacccatattacctatagcttattgctgttgccctggccatgatcaagatatatagctggagaacatgggaaaacgaagcaagactattgctgtacaaagcatacaagtttagatacttcacaaggtacatgcaagattgaggcggcttaatacatcgtctttcaccatacttcccatccttggagtcatcacaaaattctgcntggcggtac

SEQ ID NO: 620 - DNA, 249 bp, Glycine max
  unsure (1)..(249): unsure at all n locations; Clone ID: 700554080H1
tgcaattgaagttaaaagccttagccttcccnnacacactcattacatcaagacatcntcatccatgggcngcctccgtctccactgtcggagctgtcaacagagctcttttgacctgaatggttctggagctggagcttcagctcccagttcagccttctttgggaccagcttgaagaaggttattgcctcaagggtccccaacagcaaggtttccggtggaagcttcaagattgttgctgtagaaga

SEQ ID NO: 621 - DNA, 276 bp, Glycine max
  unsure (1)..(276): unsure at all n locations; Clone ID: 700554082H1
aaaaaacctccctctctcaattacaaaaccgcatgcnctgntctcctttcagggttccactgtttgctcaccctcngaanaaacaaaaattccagttttggaacttcccctgatctaaaaatctgaactttttggcatttcnncaattattttgaattctgtttctgggtttttgttttcatgggactgtgtcatggaaaacccattgaaacctcacaaagtgaaggtgggcaccacgctttccccggcggcgagaaagatgcggtggtggtttcg

SEQ ID NO: 622 - DNA, 203 bp, Glycine max
  unsure (1)..(203): unsure at all n locations; Clone ID: 700554083H1
gncttgacccaaaantncnatttntcccttgtcttatgttgttgttacaagtatttttgggtcaaggcattgaaactttttccctctctactttgttatatacacttttacagccaacaatacttgtaacaacnncatagacaagggaagaattggcattttttttcattttttgtatgatgctctataatggatgcatcatc

SEQ ID NO: 623 - DNA, 108 bp, Glycine max
  Clone ID: 700554085H1
gtgagatttgatatgtgaagagcgtgatgtgtctatctttttcttttttgtgatgtaaatattggcaaaacttgccacaagtaaaataagactacacgaaatttacat

SEQ ID NO: 624 - DNA, 269 bp, Glycine max
  unsure (1)..(269): unsure at all n locations; Clone ID: 700554086H1
ttaaagatagttctaaggtagttggaggagatcctcttctcaagcttgtagcagttgattggtttacagttgataaatccgcggatagaattgcccttcaccctaaatgtttggttcagtcagaagctgggaaaaccttccatttatccttgtcattaatctccaggttcctgctaaaccaaactacagtctggttctatattatgcagctgacagaccgataaataaaaatctctgttagctaagtttgttgatggaagtggatgcnt

SEQ ID NO: 625 - DNA, 272 bp, Glycine max
  unsure (1)..(272): unsure at all n locations; Clone ID: 700554087H1
tggcagtggcgtggctataatcccctgcggcaacaccggcaccgccgcactcttccctcaccgaacganaanaaacctccacgtggcgcgcgcgaagaagcccctcaacggcgacgacgtttccgtttacgctgagccctcaaagccgaagtttccgttttggaaaataataagcctctcgacgacaacgatgccgctttgaagttcctagagaagatagaccgtcagtttcaacagcccgatttatgggaaggaccccagtgggactggct

SEQ ID NO: 626 - DNA, 271 bp, Glycine max
  unsure (1)..(271): unsure at all n locations; Clone ID: 700554088H1
gttttgtttatttgaaattaacaagtagtaaagatgtttggaatcatcggaggaaacaagggtcacaagataaaggggaacttggtgattatgcgaaagaatgtgttggatatcaacagcattaccagtgttaagggttcatcggaaccggcattaacatcattggaggagtcgtcgacaccgttacngctttggcgtcccacatctccatccagctncatagtgccaccaaggctgatggactgggaaaggaaaagttggaaagctacaa

SEQ ID NO: 627 - DNA, 270 bp, Glycine max
  Clone ID: 700554089H1
gtctaagcagaaatggcctcttcagtgatggcatctgtggccctcaaacctgcccctttcactgttgagaagtcctcagttagaggccttccctccctctcaaggaactcctcttcattcagagttgtggccagtgtggcaagaagatcaagactgacaagccttatggaattaatggtggcatggctttgagggaaggagttgatgcatctggcaggaaaggaaagggaaagggcgtttaccagtttgtagacaaatacggtgctaatg

SEQ ID NO: 628 - DNA, 269 bp, Glycine max
  unsure (1)..(269): unsure at all n locations; Clone ID: 700554091H1
anaccactcactttctctctcctctccatgtcttcttccttacatcaaacgtagnatttttttttccttttcccctttttttaatcttaacccaatttttactctcgcaaagtggtgtatttggggaagtttgattgaaatgaacaaaggacagtcaccagagcctcttgatttcttcatctggactgttgaggatgttggcttgtggctggagactataaatcttggtagttaccgccaaatttttaaagaaaatggtgttaatggag

SEQ ID NO: 629 - DNA, 270 bp, Glycine max
  unsure (1)..(270): unsure at all n locations; Clone ID: 700554092H1
ctacatttggctatgaaggggatccaatgnngctgcttttctccaaatctgcaagcnctcatcatggatttgcagcatattattcctttgttgagaaaatcttcaaagctgatgctgtacttcattttgggacacaggttcccttgaattcatgcctggaaaanaggtggggatgagtgatgtatgttaccctgacagtctgattgggaatattccaaatgtatattactatgctgcaaacaacccttctgaggccaccattgccaagcg

SEQ ID NO: 630 - DNA, 78 bp, Glycine max
  Clone ID: 700554093H1
ggaggcactccattgctggatcaatagtgggagatgatgaaagccttgcaagctctccatctattccaagttacatgg

SEQ ID NO: 631 - DNA, 273 bp, Glycine max
  Clone ID: 700554094H1
ctccgacgtttcatcaaccttaactccggaaagtggaacggcctctttctatcaatttgattcatgtgggaatatgttgcaacaactgagtaccaggctttctgctagctcttatggggaagatgaactcatgagtccattcaaacgctgtatattaaacaaccttcatcaagtacttcaatttctggagatgacaatgatgcagaatgggcagagtacaaaattaaggaaaccaatatgtttactgttgacaaatatcaacaaataggcttt

SEQ ID NO: 632 - DNA, 258 bp, Glycine max
  unsure (1)..(258): unsure at all n locations; Clone ID: 700554095H1
cggntngagaacctccaaaacacaacaccantaggaaacaaaacaaaccattgagagcttgcacaactcncatggtantagtagcactactacttcacacactctctctctgagtgcctcacncacagattctgtgatatatataccaatggaggccctcaatgccntctggcttgacccctctatctgtgctctctgatgacaaaaacaacaagaataaacacccttctgtttctgtatgcaaagtctcnaattttc

SEQ ID NO: 633 - DNA, 271 bp, Glycine max
  unsure (1)..(271): unsure at all n locations; Clone ID: 700554096H1
anggcattggtttttagttccttcggtattctattggcgtgacaaagttataggatgtgtgagcncatcctgtttctaattgcaccaaagacattggtgtttatgttccaataagaagggccttaaggactgctcttaaagcataattaagaggaaggtgaaaagaggaaatggaattgatgtaattgtgagaacatactcaccttctcatttgaaggtggatgggataaggtggtacttgtgcaagtctaagcctatggagtgggggaga

SEQ ID NO: 634 - DNA, 292 bp, Glycine max
  unsure (1)..(292): unsure at all n locations; Clone ID: 700554101H1
ggcttgtgaatcagcaccacattcacctgagctttttgtgaggnttccaaagcatggcttcccttgcagcatccactgctgctgcttcccttggcatgtcaganatgcttggaaaccccatcaacctcagtggtgccacaaggccagctccatctgcctctagccctgcctccttcaagactgtggctctttctccaaaaagaaggctgcacctccaaaaaaagctgcagtgctgctcctgccaatgatgagcttgccaagtggtatggtcctgacagaaggatcttcttgc

SEQ ID NO: 635 - DNA, 296 bp, Glycine max
  unsure (1)..(296): unsure at all n locations; Clone ID: 700554102H1
gccttcctctctgcagagtgcagagctttctctccccgttgcttcattcattctcaacaacaaaccaatntttaaaatgagggggggcttgtggcaacttgggcaatcgatcactcgccgtcttgcccatggagataagaaggctgttgctcgtcgatgttttgcctcagaagctgagctgaaaaagacagtgtttcatgacttccatgttgctcatggtgggaagatggttccatttgctgggtggagcatgccaatccaatacaaggactcaatcaggactctaccatcaatgg

SEQ ID NO: 636 - DNA, 267 bp, Glycine max
  unsure (1)..(267): unsure at all n locations; Clone ID: 700554103H1
gccaaagcaagcctgccctaaaaattgaacanggcagagacgcaagggcaagcgagtgaacatgggaacctctgcgaacgctgtcgcaggtggtcgtggcggcgcccctgtccccaaagacgtcgactacgctaattacttctgcacctatgctttcctctaccaccagaaggagatgctctccgaccgcgttcgcatggacgcttacttcgacgccattttcaaaacaaacgccatttcgctgggcaagactgttttggagtgggg

SEQ ID NO: 637 - DNA, 295 bp, Glycine max
  unsure (1)..(295): unsure at all n locations; Clone ID: 700554104H1
tacaatctccataaccaaacacaccacatggaaatcagccaaatcccgtttttcacccaagaggactactctcacttctacaacctctacgaacccacagactctaacaacagtctcaacaataacaacagcaacaacaagngaaagcgtaacaacagaaaagaagaaggtagtggtggaggtgcagaacaaaaagggcnnnnnnnnnnnnnnnnnnncgagaacagtgaaagtaattgaaggacttacttgcttcgctgattatgttagacgaggaagaattcaagaggaacgg

SEQ ID NO: 638 - DNA, 297 bp, Glycine max
  Clone ID: 700554105H1
ttctcaggggcacacatgaacccagctgtgtccaattgagtaaatcatgactgtcactatgagtcctcctgcaagtgcaagctccaagctttgacaccatgctttcatcaatcttgctaagcccagcagaaccactccccacaaacactaacagaaatgtccctataacctccgcaaatacctttctgggaaatccaggagggtaactttgtgcaactcttgcaagagagccgccagggaaggtgatgatgatgaaatctcagggatgcttggactaggtgtctcaattgtgctagg

SEQ ID NO: 639 - DNA, 290 bp, Glycine max
  unsure (1)..(290): unsure at all n locations; Clone ID: 700554106H1
cacctcgagggattgcgggaagaagaggtttggcagggactattctggttcacaagnnnnnnnnnnnnnnnnnnnnnnnnnnnnnnnnncttgctgatgttgctgctgaagcaaaacatgcatctgaaatagtgggaacaatgggtgttgctttgactgtgtgctcaattcctggtcaagttgcatcagatcgtttggggccaggaaagatggaacttggtcttggaattcaggagaacctggggcagctgtggctgatatcagcccgtaaagtggtggtttctcatgtt

SEQ ID NO: 640 - DNA, 234 bp, Glycine max
  Clone ID: 700554107H1
atctgtgacgagcatcatggcctcgagagcagtgctattgttggctatgtgtgtgcttccggccatggttgtggccattcgcccagcaaagaaccctttttgcgtgaagggtcgcgtctactgtgacccttgccgtgctggttttgagacctcagcaaccacctacattgccggtgctgagatatgttgcaatgcaagagcaggttagcaagaggttgtgtacaccaagaaggg

SEQ ID NO: 641 - DNA, 297 bp, Glycine max
  unsure (1)..(297): unsure at all n locations; Clone ID: 700554108H1
ctcaactaagtaccaatnctaagagacgaaagcgtgggttctagaagcgccaggcacagcgccaccgccaccgccaccgtctccaacaaggttctcgtcgccgtcaaggccgagaaggtcatctctaacaccgcattagcctgggctctcactcatgtcgctcactccaccgactccatcacgctcctcgccgtttactcttctcacaaaaccggcagaaggttctggaatttttcgagactggccggagactgtacgaacggaccggcgggaaagttgccggagcaanttccgata

SEQ ID NO: 642 - DNA, 297 bp, Glycine max
  unsure (1)..(297): unsure at all n locations; Clone ID: 700554109H1
tgatttgatttttcatacactggaattattgatttagtttctatgattgatgttacctacaggagtttcaaccattgaactattatgacccaaganacgagctattggatgataaattattctcccctgtacttgcacatattcaaccagaatttcattatcaagcaaacatcgaatcagatgattggtatgggcttcaatatggtacaaatgagacaaacatgtcagactttttgaattcagttgtgaattgggatcaagtatcctttgaggatctcaattgtcaacagcagagct

SEQ ID NO: 643 - DNA, 291 bp, Glycine max
  unsure (1)..(291): unsure at all n locations; Clone ID: 700554110H1
tgattttaaaatacgtaccgttgagcaagatggaaagaccattaaactacagatctgggacacagctgggcaagaacgatttaggacaatcaccagtagctactaccgtggtgcccatgggatcattattgtttatgatgtgacagatgaagagagcttcaataatgtgaagcagtggctcagtgaaattgatcgctatgcaagtgataatgttaacaagcttttggttggcaacaagtgtgatctggaagcaaatagagcatgtcatatgaaacagctangcnttgcaga

SEQ ID NO: 644 - DNA, 290 bp, Glycine max
  Clone ID: 700554111H1
gttggtactatcgtaccaaaatcttctataaataagacccccagccctgaagtcatatccatgctaaatgatatgtgcaatgatcctaaaaatactgtgttcattgtgagtggaaggggaagagattctttaagtgattggtttacttcatgcaaaatgattggacttgcagccgaacacggatactttctaaggtggagtaaagatctgaatgggaaaccagtcccttgtctcctggatctgattggaaaaagatgtggaacctgtcagcattgtatacagaggcaacg

SEQ ID NO: 645 - DNA, 296 bp, Glycine max
  unsure (1)..(296): unsure at all n locations; Clone ID: 700554112H1
aaagttttttctcttccaaacaaacnctgnganccgccatttcctatcctgcagaatgaatactcaattttgcagaacantaccccatcacgtgcatgcacccatcatccccacttcccacttcccttccttgtacactgtctcaccctcccacccacgtttcttctttcatgccaatttctcancttctcccactcccatcttggaagaagaaccttcttccaacacccccatcatccatgttgtggatgttaactttgatgttcagcagcaatattccaagccagaacctgaga

SEQ ID NO: 646 - DNA, 288 bp, Glycine max
  Clone ID: 700554113H1
acagagaaagcattggggagtagaagtagaagcttcacttcactctgttcagttcttattgttgcatagataatttgtctctatttttgttattttctttctctctcctctttgtgcattttaatagcaactcttagtttccaatgtccaagatgttgggagtgtttgtgggacttttgctgttggtggggttggctgcctctgccaagtttgatgaactcttccagcccagttgggctatggaccattcatccatgaagagaattctcaaactcaaacttgataact

SEQ ID NO: 647 - DNA, 232 bp, Glycine max
  unsure (1)..(232): unsure at all n locations; Clone ID: 700554115H1
gnccatgctacgagcaaagcagatcactgcactttctagcagtgctaggacttttctcattggtggttcgcgttgtaatgcagcagatggtagttcatgctcttgcactgaggatgaaatttgtgtttctagacgacagcatatggcnaaatcatgttttacctgcacagaagccatccnccctagcatccaaagctacttctgaggtggatgaaacattggttncagaaaa

SEQ ID NO: 648 - DNA, 292 bp, Glycine max
  unsure (1)..(292): unsure at all n locations; Clone ID: 700554116H1
gnaggagataaatatcgaaagcgatctattgggtatgtatatagctgtcaatgtttgtttgcacaataagctgcttccttttatactgatcaaagaccaactcatcctaacaggctgcctgaaacaaaagccctttggcttgaagtgtattcaacgcacaggccattataccttgtgcctaatttaatttagaggaatgaattaatgattgactcctatcaacttaatcatgatctaatacctgtgaaagacaaattgaacctagaagctatgttagttgaagtcaaatgag

SEQ ID NO: 649 - DNA, 297 bp, Glycine max
  unsure (1)..(297): unsure at all n locations; Clone ID: 700554117H1
gaccgncaccaagcaggtctcctcaggaagcccatggtacggcccagaccgagtcaagtacttgggcccattctctggcgagcccccgtcctacctaaccggtgagttcccaggcgactacggctgggacactgctgggctttccgcagacccagaaaccttcgccaagaaccgtgaactcgaagtgatccactccaggtgggccatgctcggagccttgggctgcgtcttcccggagttgctgtcccgcaacggggtgaagttcggagaagccgtgtggttcaaggccgggtccca

SEQ ID NO: 650 - DNA, 296 bp, Glycine max
  unsure (1)..(296): unsure at all n locations; Clone ID: 700554118H1
gaccgtcaccaagcaggtctcctcaggaagcccatggtacggcccagaccgagtcaagtacttgggcccattctctggcgagcccccgtcctacctaaccggtgagttcccaggcgactacggctgggacactgctgggctttccgcagacccagaaaccttcgccaagaaccgtgaactcgaagtgatccactccaggtgggccatgctcggagccttgggctgcgtcttcccggagttgctgtcccgcaacggggtgaagttcgggagaagccgtgtggntcaaggccgggtcc

SEQ ID NO: 651 - DNA, 294 bp, Glycine max
  unsure (1)..(294): unsure at all n locations; Clone ID: 700554119H1
tggctcaaaccatgttgctcatgtctagtgtctctagcagttattccgtggatttgaagaaagaccttttcctcccaattgcagagtcaaagtttaaggcctaagttctctcaactctcattcaacccacttccaccatcaacttcttcnttttcttcaccccgtacattcacaaccctggctctcttcaaatctaagacaaaagccgctcctgctaagactaaggttacaaagccaaagcaaaaggttgaagatggtatctttggcacttctggaggattggttttactaagc

SEQ ID NO: 652 - DNA, 234 bp, Glycine max
  Clone ID: 700554120H1
tagtgcctccttgccagaagttaaaatggcccaagaaactttcctattcacatctgaatcagtgaacgaggggcaccctgacaagctctgtgaccagatctccgatgctgtgctcgatgcatgcttggagcaggaccctgacagcaaggttgcctgtgaaacctggcaccaagaccaacatggtgatggttttcggagagatcacaaccaaggccaagtggactatgagaagat

SEQ ID NO: 653 - DNA, 290 bp, Glycine max
  unsure (1)..(290): unsure at all n locations; Clone ID: 700554122H1
gtaggagataagatattgaagtagtgctaagtgcctaacacctgcagtgaacaatggcctctgcatcagcatctcttctcaagtcttcacttgttcttgacaagtctgagtgggtgaagggacaaacacttcgccaaccttctgctgcatcagttgtgagatgcaaccccaccaccccatctngcctcaccatcagagctggttcctatgctgatgagctcgttaagaccgcgaaaacagtggctttcaccagggaggggtatttggccaggagagtccangctacctgt

SEQ ID NO: 654 - DNA, 288 bp, Glycine max
  Clone ID: 700554123H1
gttttacaatcagctgggatcaaagctaaaaagccttcatggaaaattggttcgtcttttgcgctaaagaaggtgattaggagttcacctaaaatgcaaattgattttgattcagatctgattgatgaagatagtcttttgactgaggaagatttaaagaaaccccagcttccacctggtgattgtgaaattgggagcacaagaaaagcctgcaaaaatgcacctgtgggagggctgaagaagaggaaaaatatgaagttaggatgacaacagaacagatgatatcct

SEQ ID NO: 655 - DNA, 293 bp, Glycine max
  Clone ID: 700554124H1
attgagctttcactccattttcgttcccaaatactatctccaaattttgattttaccatcgatatacgacacaacatcgcaatttctcgcgggtcgttttgataactggcgaaatcgcacgataccgacagcgtcgtgcggtaatacgacacatttgttgtttgatcatgttagccaagagattaagctctttcttcaaactctccccaaaacctcagatttccacttccatgaagaaagtggatgaagagactgggcaaatactatggtagaaaggctgtgtcattgtctga

SEQ ID NO: 656 - DNA, 252 bp, Glycine max
  Clone ID: 700554125H1
tctcagatctcttctttctctacgccgcacgccgaaaccatggccggaaaaggagagggtcctgctatcggaatcgatctcggaaccacctactcttgcgtcggtgtgtggcaacatgaccgcgttgaaatcatcgccaacgaccaagggaacagaaccacgccgtcttacgtcggattcactgacaccgagcgtctcatcggtgatgcggccaagaatcaagtcgccatgaaccccatcaacaccgtcttc

SEQ ID NO: 657 - DNA, 297 bp, Glycine max
  unsure (1)..(297): unsure at all n locations; Clone ID: 700554126H1
cttgaagttatcagattttctcgcttatggaancaaatctgtatcccaagatgtcttgcctgtcttgactgatgcattcgatggaaatattttgagccttgagtttgataattttgctgaagtgcacaaactctatgaaggtggagttacactacctacaaactttcttagcaagatcgcccctataccagtgatcaaggaaatttttcgaactgatggcgaacagttcctcaagtatccaccacctaaagtgnatggcaggtggataagtctgcatggatgactggatgaagaatt

SEQ ID NO: 658 - DNA, 286 bp, Glycine max
  Clone ID: 700554127H1
gcaatcctcctagaagtgtggaagagagaaaggtggaatatgatcgggcacgagcacgcatttttagtagctccagaagttgtgattcagatgatactctgtcccagacttcaactgatgagaaaaattctcttataaacaaggatgagaatgaaactagcaagacccctgtggtttattcagaacaatgctctattggtagggatattaattctactcgagttgccatcttgagagatagggaaaagatcgcatggatccagatagatcgtactagaaagtagct

SEQ ID NO: 659 - DNA, 286 bp, Glycine max
  unsure (1)..(286): unsure at all n locations; Clone ID: 700554129H1
gngaagtgtgaagacagacacagtgagantgatgaagcgtcggttccttttggttctcttggttctctatgtccacagtggagttctacgtagaagcagatggtagtggtgggtttgtgagaacaagaggagtgcagcttatgctgaatgggagcccctactatgctaatggcttaatgcctattggctaatgtatctgcctctgcatccttctcagagaaacaaatctcatcagtgtttcaacaggcttcaaatcaggcctcaacatgccagaactgggcttcag

SEQ ID NO: 660 - DNA, 290 bp, Glycine max
  unsure (1)..(290): unsure at all n locations; Clone ID: 700554130H1
gcttcaccttctgctctagaaaattcagtgctgaaacatggcttcggctactctctctgtagccaaaccagcccttcaggcaaatgggaaaggcttctctgaattctctggcctccgaagctcatcaggcttccttcccttttctagaaaatcttcagaggatttccattctgtcatgcctccagacctatgcagttgncaagcagtggaggatacaagaaggtgtggacagaagcaaaactgaaggttgccataaagggnttggaaggattggaangaattcttgagtg

SEQ ID NO: 661 - DNA, 297 bp, Glycine max
  Clone ID: 700554131H1
aaggaactggggtgtttgtagacagagaaggtgcagggaaacacattcaagcaggagctaagaaggtgctcattactgctcctggtaaaggagacatccccacatatgtggttggtgtcaatgagtatgattacagccctgatgaacccatcatcagcaatgcatcttgcaccactaactgccttgcaccctttgtcaaggtccttgatcagaaattcggtatcatcaagggcaccatggaccaccacttcactccttacaccggcggaccaaaggcttctcgacgcgagccaccgt

SEQ ID NO: 662 - DNA, 297 bp, Glycine max
  unsure (1)..(297): unsure at all n locations; Clone ID: 700554133H1
ctcagcgcnacgattccgaagcgcatccgtctcttcgagaccatcctggcggagcagcacactcagcgcctctcgctctcgccggatcctatcaaggttactctccccgacggcagcgtcaaggaggcgaagaagtggcatacgacgccgcttgatgttgcgcgtgaaatctcgaagaatttggccaacagcgcgctcatcgcgaaggtcaatggcgtgctctgggacatgactcgccctctcgaggacgattgccagctccagatcttcaagttcgacgacgacgaaggccgcgac

SEQ ID NO: 663 - DNA, 295 bp, Glycine max
  unsure (1)..(295): unsure at all n locations; Clone ID: 700554134H1
cnggaagatatcttgacaaaatggccgtaacagaagcaaacctaaagaaggctggcttccacacatgggagcagtnaattctcaaggatccacatcttatcactccaaatgcactttcatacaaatcagcaatgagagagaatctgttgaggcagggatacagaattgttggaatcattggagaccaatggagcgatctgcttggagaccacagaggcgaaagcaggacctttaagcttcctaatcccatgtactacattgagtagtaccttcacctctctcaacaatctagcta

SEQ ID NO: 664 - DNA, 291 bp, Glycine max
  Clone ID: 700554135H1
ccaatatcttctttgtcgcttttattatctgtttttccggcgatggattccggcgcgtggctcctgttcctggtggtcgtggctgtctcaacgtccggccacattcactctgaagcgatcctgagactcccgtccgagagcgaggagatctcgcgcgactactgcgacagctggatgctggcggtggagacgaacaacgccgggacgtggaaccgcgtgccggcgagttgcgtggacttcgtggcggaatacatcaccggagatcggtaccggcgggactgcgacgtgatc

SEQ ID NO: 665 - DNA, 293 bp, Glycine max
  unsure (1)..(293): unsure at all n locations; Clone ID: 700554136H1
ctgccatcttgcaagatggcagcgtcatcagcatgccttgtaggganttggtttatctacacggggtaatagaataactctcannaaggacttcaatggaagatatctctactcaccttggagactttcatcattgaacaataaggcatcagangcantttccataaagtcttccttngagcaaaggcaacaacaagaagggagaagggggtttctaaaactgttgcttgganatgtggganttggtttgcctgcactattggcangtggcgaagcttatnctgatgaacang

SEQ ID NO: 666 - DNA, 285 bp, Glycine max
  unsure (1)..(285): unsure at all n locations; Clone ID: 700554138H1
gttggattttcaaggaaggagaaggcaaaaaaatcaattatgttacagtatttgaacgccctgggttgaaggaatttttaaagcaactcagtgaatttgctgacatggtgctgtttacagctggtcttgaaggctatgctagaccccttgttgacagaatagatgtggaaaatcgattcagtctacgactttatcggccctcaacaattagcacggaatatcgggagcagtcaaggatctacctgcatctcaaaggatcttgtcgcatgttatgtagacaatanc

SEQ ID NO: 667 - DNA, 289 bp, Glycine max
  unsure (1)..(289): unsure at all n locations; Clone ID: 700554139H1
atccctctttcttcctcttcctcagtagtgcgattttcgattctcttctctgcaactatgcctaaccctaaggtcttcttcgacatgaccatcggcggtcaacctgccggccgcatcgtgatggagctctacgccgacgtgactccgagcaccgccgagaacttccgcgcgctctgcaccggcgagaagggcgccgggcggagggcaagcncctccactacaaaggctcgtccttccaccgcgtgatcccgaattcatgtgccagggcggcgacttcaccgccggaaag

SEQ ID NO: 668 - DNA, 296 bp, Glycine max
  unsure (1)..(296): unsure at all n locations; Clone ID: 700554140H1
gcttctaacgcactcttctaaacttaacacaatggagcttagcaaattgacgttagagatcttctcaaaattggagcagcaatggctctcgcactacgaagcatcaaccaaaacgcgcattctcagcattgacggcggaggaaccaccgccattgtcgccggcgcttccctcgtccacctcgaggaccagatccgcgcccaaacctccgatcctcacgcgcaaatncactgattactttggacatcatcgccggcaccggcattggcgccatcctcgccgtcatgatcaccgccga

SEQ ID NO: 669 - DNA, 292 bp, Glycine max
  unsure (1)..(292): unsure at all n locations; Clone ID: 700554141H1
tttgatttaatctgattttcgtgtttgtggttttcgtagatcggtgtttcttttcgtgataaatggatcaggaaaattagatgaattccaatttttctntttttgaaaattcttttttgtggttaatttggtaggtttagatacactagttgcgactttngtctttccagttttgaatttttngactttgatatgaaataaatcatatactttgngngtgctcatggtgccaaggaaaattagtctatccttttcggcgggccacttcgtaaaaaaactttggtagatttag

SEQ ID NO: 670 - DNA, 290 bp, Glycine max
  Clone ID: 700554142H1
gccaatgcgcagaacaaagagagagcgaggcttaagaaactcttcgaagaagcctacgagagatgccgcaatgctccaatggaaggtgtttccttcaccatcgaagacttcactgctgctcttgacaagtacgacttcgattctgaagttggcggcaagattaaaggcactgtgttctacacagataacaatggagcagttgttgatatcactggcaaatcttcgggcatattgccactggcaagaggcgtgcatccacaggttaagcagttgaagaagcaggcttattc

SEQ ID NO: 671 - DNA, 276 bp, Glycine max
  Clone ID: 700554143H1
attcgatcatttgccagaacaaatggttatgaaactgaggttgaagaagttgatccttttgcgcaattccagagaggccccagaatacagaaaccagcggaagtgcactctaattgacacaaccaatgcgcaattagtatgtgatcctcacttgttcatgttgccatgaccattgattggcactacttaagagggtctatgctgcagtgcatctgtcgtgaaacacactcctggcccgctggaatctgttcttcattcatgcatcggatgcaagat

SEQ ID NO: 672 - DNA, 288 bp, Glycine max
  unsure (1)..(288): unsure at all n locations; Clone ID: 700554145H1
tctttttctcaaccaaaaggggttcaattctagctagttctattacatcgtccgcncaccatgaacatggcgatcgtgcttctgttcatggttttcgcagtttcatcagctttagacatgtcaataatatcacatgacaacgctcatgcggatagggccacgaggcgcaccgacgacgaggtgatgtcaatgttcgaggagtggctggtgaaacacgacaaggtgtacaacgcgctcggtgagaaggagaagagtttcaaatctttcaagaacaatctgcgcttatcg

SEQ ID NO: 673 - DNA, 290 bp, Glycine max
  unsure (1)..(290): unsure at all n locations; Clone ID: 700554146H1
cnaggnttcccttagtaacggcgagcgaaccgggaaaagcccaccatgaaaatcggtcgccctcggcgtccgaattgtagtctggagangcgtcctcagtggcggaccgggcccaagtcccctggaagggggcgccaganagggtgagagccccgtcgtgcccggaccctgtccgcaccacgaggcgctgtcggcgagttcgggttgtttgggaatgcagccccaatcgggcggtaaattccgtccaaggctaaatactggcgagagacgatagcgaacaagtacgcgag

SEQ ID NO: 674 - DNA, 289 bp, Glycine max
  unsure (1)..(289): unsure at all n locations; Clone ID: 700554147H1
gtnntacaatcagctgggatcanagctanaaagccttcatggnaaattggttcgtcttntgcgctaaagaaggtgattaggagttcacctaaaatgcnaatngatttngattcagatctgattgatgaagatagtcttttgactgaggaagatttaaagaaaccccagcttccacctggtgattgtgaaattgggagcacaagaaaagcctggcaaaaattgcacctgtgggagggctgaagaagaggagaaagtatgaagttaggatggacaacagaacagattgata

SEQ ID NO: 675 - DNA, 289 bp, Glycine max
  unsure (1)..(289): unsure at all n locations; Clone ID: 700554148H1
gttccgcagaaaggccttcttgcattggtatactggagaaggtatggatgaaatggagttcactgaagctgagagcaacatgaatgaccttgtgtctgagtaccagcaataccaagatgcaactgctgatgacgagggctatgagtatgaagatgaggaagaanctcaggaagatgaggcttaaaacagtgtagtagtgttttgcagggtgttctgtttgtgtgttttgttgtgatactctgtttaacgttgtgttttttttcatcatccctggacctgaatacttttt

SEQ ID NO: 676 - DNA, 157 bp, Glycine max
  Clone ID: 700554149H1
gcataccccatgacttattggacactgtggagaggttgaccaaagagcactacaggaaatgcatggaagagaggttcaaggaatttatggcaagcaaaggtctagatgctgtccaaactgaggtcaaggacatggattgggagagcaccttccacac

SEQ ID NO: 677 - DNA, 290 bp, Glycine max
  Clone ID: 700554150H1
tgcaaaacgagaagtatccaacaatgactaccacccgtgttgctatctgtctttgctttgcattcctttactacgcggctgaaggagccaaggttagtttcaataacaagtgctcatacacggtatggccaggaaccctaaccggtgaccaaaagccccaattatcaacaactggtttcgagttgggtccaggagcatccaactctgtggaccttccatctccatggtccggtcggttctgggcccgaacaggatgctccaacaacaacggaaggttcagctgcgccacc

SEQ ID NO: 678 - DNA, 249 bp, Glycine max
  unsure (1)..(249): unsure at all n locations; Clone ID: 700554151H1
caacgcantggcggtgagggacanncgcgcgcgcatggacggacnacgtctcagcggcgctgaagaaggcgaantgatcaagctcaagctcgaggcgctggagcggtccaacgccgcgaaccggaacatgcctgggtgtggaccgggttcgtcctcggaccggacccggacctccgtggtcaacgggctcaagaagaagctgaaggatgctatggagattttaacgagattcgccagcttgtgtcctcg

SEQ ID NO: 679 - DNA, 283 bp, Glycine max
  unsure (1)..(283): unsure at all n locations; Clone ID: 700554152H1
ttcttccccaccatcacaccaancaaacctcactctncctggccatggtcatgnnngcctttccgccacttcgaaccggtttccaaatgcagcaccgaaaaccggtttaaccaaaccgtggcctcggacttggacggcaccctcctggtgtcccctagcgcctttccttactacatgctcgtcgccatcgaagccggcagcttcctccgtggccttgtcctccttggatccgtccctttcgtgtacttcacgtacatattcttctccgagaccgcggccatca

SEQ ID NO: 680 - DNA, 148 bp, Glycine max
  Clone ID: 700554153H1
acaaacaaacatcgtcgtcttcatcgtcataatcatctaattcttcttctttgttcagcttccgtaaccgtaacgttaacgtcatcgtcatcgtcatcgtcgtttatcccaaaacgatggacttcaccactttcgcaaattccatatc

SEQ ID NO: 681 - DNA, 256 bp, Glycine max
  unsure (1)..(256): unsure at all n locations; Clone ID: 700554154H1
tgangatggaattgantagttgacgagaacganttgaaagcngccggcgctganactcttcgncgaaggtggccggcgaggcattcgtatcaatggctggttgatcgagactcggaggcactccatactgaactcttccacattccaagagtggtcaacagaaactcgatacgtctncatttaccagaaatggtttttggggaaaacacttgatctaaaacacttgagcagtggaaccaacatcatttaatgcatt

SEQ ID NO: 682 - DNA, 288 bp, Glycine max
  unsure (1)..(288): unsure at all n locations; Clone ID: 700554155H1
tgaagttgaagtcttgcccttctctcttcaactccaaacacaagacatcatcatccatggctgcctccgtctccactgtcggagctgtcaacagagctcttttgaacctgaatgggtctggacctggggtttcagctcccagttcatccttctttgggagcagcttgaagaaggttattggctcaagggtccccaacacaaagatttcctctggaagcttcaagattgttgctgtagaagagaagaaagagattgaagagacccagcagaccgncaaggacagatggc

SEQ ID NO: 683 - DNA, 288 bp, Glycine max
  unsure (1)..(288): unsure at all n locations; Clone ID: 700554156H1
gctattacctctttttccaaactctaaaaatttttagttccacaaaaccaaaccantatggcagcagcctcggcctcatccaccatgatatcaacaccagccttatctccaagcacaagcatccaaaagcaccatcatttgaagccatccaacgtgtgctttcaaggccttagacccctcacaaggttcacaaccaaagtgagcagcaccaccaaaagggttattccaaaggtggtgtcggtgttagagctgaatcaactcagcacttgtcataagcctcagcatggg

SEQ ID NO: 684 - DNA, 290 bp, Glycine max
  Clone ID: 700554157H1
ggcaaattgcttacccaatcaccagccatgggagacgttgacccagctttcattcaagaaccacaacacaggccaaatctctccaccattcaagcagaaggaattcccataattgatctctctccaataaccaaccacacagtttcagacccttctgcaattgaaagcttggtgaaggagataggacgtgcatgccaggagtggggcttcttccaagtaacaaaccatggagtgccactcactctaaggcaaaacattgagaaagcctcaaaatgttctttgctcagact

SEQ ID NO: 685 - DNA, 237 bp, Glycine max
  unsure (1)..(237): unsure at all n locations; Clone ID: 700554158H1
ttgtttgatggtttgntgcattcctttttaagtttcctattcttcctttttatttcctgcttattaatttttccattcagctggtgaatatactcccaaaaccatgttacagaagcaacaacaaggacacacatggaagggatgtgcacggggagagtgaaacactgaggatgctaagtcaaacccaccttcatctccagccttcaagaaatggcaacaaagataggtcctacagtc

SEQ ID NO: 686 - DNA, 285 bp, Glycine max
  unsure (1)..(285): unsure at all n locations; Clone ID: 700554159H1
taataatgagcgagttccgcgtgtttgcagaagcgtgtgggcgtgaggntcatgganattctccgcatgccaaacctcaacacagacgatctaagagtgcttctgaaaggaacctggcaaacgcaagangtggtggagcctcgcatccactcgagaaagaccacaatgaatcccttgtttcaacatcttcggtgagtgctctaggttacggagtccgttgcatgacaatctcactcgtgtanacaagaatacctcttcaaatcatagagcattcttagaaaaaga

SEQ ID NO: 687 - DNA, 276 bp, Glycine max
  unsure (1)..(276): unsure at all n locations; Clone ID: 700554160H1
gactagcaagtgatgatgaaccatttgctggactagcttttaagatcatgagtgatccatttgtaggttcccttacgtttgtcagggtgtatgctggnaagctaggtgctgggtcttatgtactcaatgcaaacaaagggaaaaaggagagaattggtagactttagaaatgcatgcaaacagcagagatgatgttaaagtggcttagctggtgatatatgctctgcagtttgaaagatactattacagtgaaacatgtgtgacccggatatccat

SEQ ID NO: 688 - DNA, 284 bp, Glycine max
  unsure (1)..(284): unsure at all n locations; Clone ID: 700554161H1
aatttttctctcaaccggcccaatttagcataagcccagcatggccaccgcaacagcagcagccacctcgtccttcatggggacgcgcctcctggaggcccactccggggcggggcgggtgcaggcccggttcgggtttggcaagaagaaagccgccgccccgaagaaagtttccagggggtcgggctctagctccgataggcccctgtggtatccggnacgccaagcgccgagtacctggatgggagccttgtcggagattacggatcgacccattgggctag

SEQ ID NO: 689 - DNA, 260 bp, Glycine max
  unsure (1)..(260): unsure at all n locations; Clone ID: 700554162H1
ctcgagaactgtctttactttcggtgtcggcacaagccactganttcccatcanttctacaanaccttccttcaatgcctcaccaaatacacaantaacccctccaacatagtcttcgccaacaccaaccccaagttccccactatcctccaaaactacatccgaaacgcgcgtttcaacacctcctcgacgcgaaaaccatactcatcgtcatccccagcaagaatcacagtccagggcacagtaatctgcggccaaag

SEQ ID NO: 690 - DNA, 285 bp, Glycine max
  unsure (1)..(285): unsure at all n locations; Clone ID: 700554164H1
cttggattaccttggaagaaatggtgattccatgggtggaactggttggaagatgactgaatttggttgggatgtcaagtatgctggtgttcagacattagttgccaagttcctgatgcaaggcaaagctgggcatcatgctccagttttcgagagatatcagcagaaggctgaatctttcatgtgttcgtgcctggaaagggtgatcgcaatgttcagaagactccgggtggcctcatcttccgccagagcatggaacaacatgcatttgtcacaatgcctcnt

SEQ ID NO: 691 - DNA, 289 bp, Glycine max
  Clone ID: 700554165H1
ctcaactaagcgcaaaccaaaccaacacaaacaaaaacatctctcagcaaatgaatattctcggacaatcactccaccaatcaaacaacggcagctactcttgttcgtcgccggagactgcaaactcctctaaccttccgaccactccgaaagccgttcaccccgacgaggaagtgaacacattagcatcggctcatcctaagaaacgtgcggggcgtcgaatttttaaggagacaaggcatcccgtgtacagaggagtgcggcggaggaacaacaacaagtgggtctg

SEQ ID NO: 692 - DNA, 285 bp, Glycine max
  unsure (1)..(285): unsure at all n locations; Clone ID: 700554166H1
gncatggaaacaggcatagcatgctacactcgcgggcctttcttgcctagtgtttcttccaagcactctccaccttccatttctccatcttttggcttgaggagtctgaaatcaagctctttatttggagaatcgctaagagtggcctccaaatcaacaataaaggtttcaaagacaaagaatacttcactcgtgaccagatgtgaaattggtgacagtctcgaagaattcctcacaaaagcaacaccagataaggggttgatcagttgttggtgtccagggaga

SEQ ID NO: 693 - DNA, 283 bp, Glycine max
  Clone ID: 700554167H1
tgcaattgaagttgaagtcttgcccttctctcttcaactccaaacacaagacatcatcatccatggctgcctccgtctccactgtcggagctgtcaacagagctcttttgaacctgaatgggtctggacctggggtttcagctcccagttcatccttctttgggagcagcttgaagaaggttattggctcaagggtccccaacacaaagattcctctggaagctcaagatgttgctgtagaagagaagaaagagatgaagagacccagcagaccgacaagaca

SEQ ID NO: 694 - DNA, 282 bp, Glycine max
  unsure (1)..(282): unsure at all n locations; Clone ID: 700554168H1
cttggattaccttggaaganatggtgattccatgggtggaactggttggaagatgactgaatttggttgggatgtcaagtatgctggtgttcagacattagttgccaagttcctgatgcaaggcaaagctgggcatcatgctccagttttcgagagatatcagcagaaggctgaatctttcatgtgttcgtgcctggaaaggtgatcgcaagttcagaagactccgggtggcctcatcttccgccagagaggaacaacatgcatttgtcacaatgcctcatt

SEQ ID NO: 695 - DNA, 287 bp, Glycine max
  Clone ID: 700554169H1
gctaaaatcacttcatcatggcttcctcgtgtgcttcctctgccattgcagctgttgccatctccacaccaagttcccagaagaatggatcactcttgggaagcacaaaagcttcttttcttagtgggaggaaactgaaggtgaacaactttacagcaccagttggagcacgatccagcactacagtttgcgcagttgctgagcctgataggcctctgtggttcccagggcagcacccctcctccatggctagatggcagtttgccaggagatttggcttgatcctc

SEQ ID NO: 696 - DNA, 284 bp, Glycine max
  Clone ID: 700554171H1
gtccaagcagcctccaattcgtgccactctcttcaaaatggccgttaccttctcaaatctccacacagaatcaggtctcaagtccctcgacgacttcctctctgggaaggtctacgtttctggggatcagttcacaaaggacgacatcaaagtgtatggtgctgttttggagaagccaggtgactcttttcccaatgctgccaagtggtacgaggttgtctcatctcagcttgctgcaagcttccccggcaatgctcaagggtgagatcatggcaaagctctgc

SEQ ID NO: 697 - DNA, 287 bp, Glycine max
  unsure (1)..(287): unsure at all n locations; Clone ID: 700554172H1
atttatttatattgtgtgcttttgatcttggagcaagacttcaattcatatacaccaaagacacatactatcttccataagcaaaggactcaaagtaatagtnttctacaaaaaaatccaagtttggggggggatctacatctctatgggattatcactttccttactctcatcagcctgggaagaaatcgttagacattcactatttggtctgtctttgaacttcacttttggttccaaagatggggctatgatttgagatcaggtagcttcaagataagagaatc

SEQ ID NO: 698 - DNA, 283 bp, Glycine max
  Clone ID: 700554174H1
ataatcgattcgaacgttcttgaagttgaaagtcattaactatgggaatgatagtggaggttgaaaacgaaaacggagacctaaacgacgccgttcttgttccaccccctaacttctccatggtcgaggactgcattttccgatccggcctccccaacccttccaatttcccctttctccaaaccctaaaccttcgttccatcatatacctgtgccctgagccttatccggaagaaaatctggacttccttcgttcgcagaatattcgcctttttcaattgga

SEQ ID NO: 699 - DNA, 283 bp, Glycine max
  Clone ID: 700554175H1
tctagggttattttctctctcttggattccattcctgcgtcttcatcagagccaatggaagcggcggcgacggcaacggcaacagttctcgcaccaccgtcggctttcctcggaagaccctccgtactcgccttccgttccaatcttcgcttctccactaagttaagcacttctgtagctatctccaagcatggtcatgggagacactgtgttggaactagaaggggttttgtagttagagctgcatcatttacaccagagtcatccgaaccgagttccaaga

SEQ ID NO: 700 - DNA, 222 bp, Glycine max
  unsure (1)..(222): unsure at all n locations; Clone ID: 700554176H1
ttcaataaaatataaactacaatcggtgggatttggagatcatggcaactgggagaattgcaagttttagaaactatgttctagggggaactaccctgaattgagaatttttgtctttagaaacccgcttatattatttgtttctatatatctttgtgttgtcatcggattatntggatagtaataatttcacctttaatgtgtcaacggattattggatgg

SEQ ID NO: 701 - DNA, 199 bp, Glycine max
  unsure (1)..(199): unsure at all n locations; Clone ID: 700554177H1
gngagagggnctcnttggngcttcncantaagccatccacaattancattcctcattaggactctagtatttcantgttccttcattttgtatccaatgccaaggtgtgtaattataaaggttttgaaatatacttcataatntctaaatcatttcaaancttaaatagttattttatcatgaattcttttaaaaaaaa

SEQ ID NO: 702 - DNA, 279 bp, Glycine max
  unsure (1)..(279): unsure at all n locations; Clone ID: 700554178H1
caaaacccgtgtctgtgtttgtttccactttgcaaatcagtgtgtacccaggaatctcttgattgagaaagtgtgttagggtaagagttgtgtcgtgtccacgagacactgggagaaagaaagtgtgtgtgagttgttgtaaactgaattttcatttttctttagccatgagcacacttgttcgcaacaccaccctcaccttcagccgcagaaacagatacgagctcttggtttgcaggcaaagacaagaggtcaagtccatcagctnacagacgcaga

SEQ ID NO: 703 - DNA, 239 bp, Glycine max
  Clone ID: 700554179H1
tatcatgttaattttgtaaattggctatttgtgatttgtccatacgtgcttgccccaattcatttttctaatgatttgagcatacccgcaactcttagttcttgaatagcacatttatatgtattttttttcactttattttctgtacgggcaactcaatgctctaagaacttcaaagcattgtactaggaagaagctcgttatactacatatgagtttctccttgattcctcatttaa

SEQ ID NO: 704 - DNA, 250 bp, Glycine max
  Clone ID: 700554180H1
agtaataatatgaataattatggctcttctggtactcagaatttttaccaaagcactggacgaccacctttgccaaaccagatgaaaactggtcgtggaagtagttccagtcttatcagacatggtagctcacctgctggattgttttcaaacattaacattgatactggctatgctgctgttagaggcagggaactatgggagctgctgctgctaataacaccaccgaggaagcaaacttttcacccgc

SEQ ID NO: 705 - DNA, 276 bp, Glycine max
  Clone ID: 700554181H1
aaaggattctacccgccgctcgatgggaattgcgcttcaaggcgtctcgtagggctaatccgcctcacgagggtcaccaacggcacgtgcctttggggggccgaggccccctactgctggtcggcaaacggacggcgggcgcacgcgtcgcttctagcccggattctgacttagaggcgttcagtcataatccaacgcacggtagcttcgcgccactggcttttcaaccaagcgcgatgaccaattgtgcgaatcaaggttcctctcgtactaggt

SEQ ID NO: 706 - DNA, 283 bp, Glycine max
  Clone ID: 700554182H1
cgctttatgaattcattccgatctttggagaataatactcaggggcaaccagataaagttgtttccttggcaaaatggaggatcttaaatagactgcatgataggaatgagactttgtactacagagttcttattgataatattaaagagtttgctccaataatatatactcctacagttggattagtgtgtcaaaattattcagggttatttaggcgtccacgtggaatgtatttagtgccaaagataaaggagagatgatgtcaatgatctataactggcc

SEQ ID NO: 707 - DNA, 284 bp, Glycine max
  unsure (1)..(284): unsure at all n locations; Clone ID: 700554183H1
tatcatacacacttgcacaaaaacaaaactntcttcccaattccgatcctcaaggccgnncccgaaaacttctcatancacaatgctctttccgttgtttccacttcctctcccactctgagtcagttcccatttaaaaacaaagactccctctaacccttgnnnnnnnnnnnnnnnnngcatttttcactcttncgtaattttacattgatatataattatgcaaccctgtagcagagaaatgcaaggcctcaactccctcttaaatcttcctcccaaatctc

SEQ ID NO: 708 - DNA, 280 bp, Glycine max
  unsure (1)..(280): unsure at all n locations; Clone ID: 700554184H1
tnggagatgaagaagggcttgatggatagctatggcgttgctgtgattgtgttggcttgagtttgtgtttgggttcatcatcggagcaattaaattcacgagaatgcgagaatctcggtttcatcggactcgccttgtgctccgactgcaacactctctccgagtacgtcaaggacaaagtgattatttgaatcgtctaaatcaatatcgccagagagtttggactgtaaaattactggaaaatctggctgactatgaagaggctctggtgttagagaag

SEQ ID NO: 709 - DNA, 284 bp, Glycine max
  unsure (1)..(284): unsure at all n locations; Clone ID: 700554185H1
ttaatcctatcctatcgtagcaaagaaaganaganagaaaaccctagcttaccttttcaactttcaagatgcaaatccttccgttaagacactcactggtaagacaatcacccttgaggtggagagttcagataccatagataatgtaaagtccaagattcaagacaaggaagggatcccaccagaccagggccgtctcatttttgctggcaagcagcttgaggatggacgtacacttgctgatacaacatccaaaaggagtccactcttcacttggtgctcgg

SEQ ID NO: 710 - DNA, 275 bp, Glycine max
  unsure (1)..(275): unsure at all n locations; Clone ID: 700554186H1
cttttggttgccaaaccctccaacgggttataaagccatgggcatagtagttaactagcagtcctaatgaacctgaagttgaagaagttagatgtgtgcgagatgatctcacagaaagttgtgagacttctgatctgttactactgtaaagtcaaaatattcaaaagattcatttcaggtttggaatacacaaccctgtgatagaggtatgttagctagaggtgtagctgttggggcatctctgtggntntcacatctgttgatcctgaacaagt

SEQ ID NO: 711 - DNA, 222 bp, Glycine max
  Clone ID: 700554187H1
gagccttcacgttctgtcagcaagacagagcgattctctgcaaagagtgtgacgtgtcaattcactctgccaacgaacacacccttaagcacgataggttccttctcactggtgttaaactcgcagcttctgccatgcttcgttcatcacaaactacctctgattcaaactcaaccccttctcttcttaacgtttcacatcaaactactccacttccatctt

SEQ ID NO: 712 - DNA, 284 bp, Glycine max
  unsure (1)..(284): unsure at all n locations; Clone ID: 700554189H1
gttaaaagccttagccttccctacaactccaaacnggtnagacatcntcatccatggctgcctccgtctccactgtcggagctgtcaacagagctcttttgaacctgaatggttctggagctggagcttcagctcccagttcagccttctttgggaccagcttgaagaaggttattgcctcaagggtccccaacagcaaggtttccggtggaagcttcaagattgttgctgtagaagagaagaaagagatgaagagacccagcagaccgacaaggacagatgga

SEQ ID NO: 713 - DNA, 282 bp, Glycine max
  unsure (1)..(282): unsure at all n locations; Clone ID: 700554191H1
ctttgttcactcttcttctcttgcggctagggttttagcgcantttcttctagatttaaggnagatgggtaaggnaaaggttcacatcagtattgtggtcattggccatgtcgactctgggaaatccactaccactggtcacctgatttacaagcttggaggcattgacaagcgtgttattgagaggtttgagaaggaagctgctgagatgaacaagaggtctttcaagtatgcctgggtgctggacaaacttaaggctgagcgtgaaagaggaatcaccat

SEQ ID NO: 714 - DNA, 277 bp, Glycine max
  Clone ID: 700554192H1
ttgaatcaggtttaccaaatattgcaatatgtggaattgtatcagagagaaaacaggctcaaacccatgcctattatactctgtggtgactggaatggaagcaagcgtgggcatgtttacaagttcctaaggtcacaggggtttgtatcatcatatgacattgctaatcaatacagtgacagttatgcagattctcacaagtgggttagtcaccgaaatcataggggaaatatctgtggtgttgactcattggcttgcaatcccaaccaagcacgta

SEQ ID NO: 715 - DNA, 278 bp, Glycine max
  Clone ID: 700554193H1
aggcccatgcttattgatgaccaagcaaactgctcaaatgcagttcttcttggctttggcattgttgaccaatgcactaagcgtgatgaaattataaatttactaatgtctgagactgccgaagcagggatagatggagcaaatttatctttgttatcagacttgatgaaattgcagttgtcaggcattgatgaaactcagcaaccattgtcatctcttatctacccaactagcaaattcaacatcctgaagccttgctgtatttgttcaaggttcag

SEQ ID NO: 716 - DNA, 279 bp, Glycine max
  unsure (1)..(279): unsure at all n locations; Clone ID: 700554194H1
cgaganatggcgatggcaatggcgcttcgcaggctttcatcttcaattgacaagcctctgcgccccctcttcaatgccggttccctctactacaagtcgtctttgcctgatgaagctgtttacgacaaggagcgacccggagttacatggccgaagcagttgaatgctccacttgaggtcgtggatcctgagattgctgatattattgagcttgagaaagctaggcaatggaaggggctagaatgataccgtcagagaatttcacctctgtgtctgtga

SEQ ID NO: 717 - DNA, 192 bp, Glycine max
  unsure (1)..(192): unsure at all n locations; Clone ID: 700554195H1
gngagagggactcattggaacttcccactaagcnatcnacaattaacattcntnattattactctagtatttcattgttccttcattttgtatccaatgccaaggtgtgtaattataaaggttttgaaatatacttcataatatctaaatnatttcaaaacttaaataaattattttatcatgaattctttt

SEQ ID NO: 718 - DNA, 296 bp, Glycine max
  unsure (1)..(296): unsure at all n locations; Clone ID: 700554201H1
annaaaagctaaagttgggaaggggaagaaagttcaagggatcctaacatgcctaagcgtcctcccacagctttctttgtcttcttggatgattttagaaaatctttcaaagaagctaatcctgattctaaggatgttaaaagggttggtaaagaggctggtgaaaantggaggtctatgactgatgaagagaagaagccatatcttgacaaagttgctgagcttaaggaagagtacgagaaggctatgggaaagctngaagctggtccagatgaagaagatcaaactgtgtctga

SEQ ID NO: 719 - DNA, 221 bp, Glycine max
  unsure (1)..(221): unsure at all n locations; Clone ID: 700554203H1
gaggttctagaatcttctcctcctgaaggngtntgttccaacaaggtgganaaccacctggtccanaccaatttgtctgatgggtcacccaacaagtctgtgccagcatctggacttgatgcagtgattcctagtgcaaatcagcttaccatcttctataatgggagtgtttgtgtctatgatggaatccctgcagagaaggtgcatgaaataatgcttat

SEQ ID NO: 720 - DNA, 281 bp, Glycine max
  unsure (1)..(281): unsure at all n locations; Clone ID: 700554204H1
aattgttgtaactttttgattnctaaattctctaaaattcgaaattntnatttcgtnangggatagnnatntntgtgcntgagngagtatggctggacaaggtgagggtcctgctancggaatcnatttgggaacgattactcttgcntcggcgtgtggcaacacgatcgtnttgaaatcatagccaacgatcagggtaacagaactaccccatcctacgtggcttcaccgacacagaanggttgatcggcgctgcggcnagaaccaggtcgctatgaacc

SEQ ID NO: 721 - DNA, 288 bp, Glycine max
  unsure (1)..(288): unsure at all n locations; Clone ID: 700554205H1
gagataactagaaacagtgtgatgaaaatgaaggtccttgttttcttcgttgctacaattttngtancatggcaatgccatgcgtaacgatatgttccctctccgaatgaacactggctatggtgcccgtactccggaggtgaaatgcgcaagttggaggcttgctgtggaagcacacaacatctttggctttgagaccattcctgaagagtgcgttgaagcaacaaaggaatacatccatggcgaacaatatagatcagactccaaaacagttaaccaacaagctta

SEQ ID NO: 722 - DNA, 292 bp, Glycine max
  unsure (1)..(292): unsure at all n locations; Clone ID: 700554206H1
gntcatnttcctctttttctcaaccaaaaggggttcaattctagttagttctanttacatcntccgtnancatgaacatggcnacnnntgcttctgnncatnaantttcncagnttcatcagctttagacatgtcaataatatcacatgacaacgctcatgcggatagggccacgangcngcccgacgacgaggtgatgtcaatgttcgaggagtggctggtgaaacacgacaaggtgtacaacgcgctcggtgagaaggagaagaggtttcaaatcttcnnnnncnatctg

SEQ ID NO: 723 - DNA, 286 bp, Glycine max
  unsure (1)..(286): unsure at all n locations; Clone ID: 700554207H1
aagctgctgatgaaggcttggtaataattcagtctccaaaggtgggtttctttaggagatcacggacgataaaggggaggcgtgctccaccatcatgtaaagaganacaaaatgttgaggaggggcaagtgatttgntatattgaacagcttggtggtgagctgccaattgagtctgatgtgtcgggagaggtcatcaagatcctacaaaaggacggcgatcctgttggatatggtgacgcacttgttgcaatatgccatcattcctggaataaagaagcttcaat

SEQ ID NO: 724 - DNA, 293 bp, Glycine max
  unsure (1)..(293): unsure at all n locations; Clone ID: 700554209H1
aaaaagctanagttgggaaggggaagnnagtcaaggatcctaacatgcctaagcntcctcccacagctttctttgtcttcttggatgattttagaaaatctttcaaagaagctaatcctgattctaaggatgttaaaagggttggtaaagangctggtgaaaantggaggtctatgactgatgaagagaagaagccatattcttgacaaagttgctgagctaaggaagagtacgaganggctatggaaagctagnagctggttcaagatgaagaagatcaaactgtgtctgga

SEQ ID NO: 725 - DNA, 296 bp, Glycine max
  unsure (1)..(296): unsure at all n locations; Clone ID: 700554210H1
ctctacaacggtgtttatagtttaacccaaattaccgaattctgatcggatcatctctaaaccctagatggaccttctgaagcaagagcttctcaagangcgccaatccctggcgcaagacaccggcggcaagaaattcttcaagcgctccgagatccagcagaaggaaatccaaaaactccgccagcaagagaagcgcgaattggaagccaagttcactaaagcgcctncgcaacatcctccggacaccgccgccaccgccccgtcctcttcatccaccggcttcttctcggctt

SEQ ID NO: 726 - DNA, 292 bp, Glycine max
  unsure (1)..(292): unsure at all n locations; Clone ID: 700554211H1
aaaaaaaacagagtgggtagggtgacggaagcagaaaccaaacacaacttcaatcgcgaaatgtcgaatttgccccaatcgctgtcgatgggcgcngccttcggcggaggcggcgctccgccgcagccatcgagtgtcggcnncggagcacagggttccngtgcnggcaaggatcggaagatggcgtcggcggagcanttnntgctcgaactacagcaaccctgagctccgtnaaaacgcgcttctcgaatctcacggaagaggganctatttcaagatcttgctccattgc

SEQ ID NO: 727 - DNA, 294 bp, Glycine max
  unsure (1)..(294): unsure at all n locations; Clone ID: 700554212H1
catccctcatcttctctgttctatagcaaaaaaacagtaatcataacttgatttagatctcaaaaatcttgatcatccaccatcattacctttagatctttctcccttttgctcactatcactctcagtctctcacctatccacccaacatgccttcanngggtttccattctctgtgtcactgggacaatacaacagtcccaattctcaccctttcacaccaccattctcgcttcancctccaccctcatattccaccaaaaaagcatgcatctttggtgccatgcctcanac

SEQ ID NO: 728 - DNA, 294 bp, Glycine max
  unsure (1)..(294): unsure at all n locations; Clone ID: 700554213H1
attcatccacttagagagacattgtggttacccatagtctcatatagtgtcatacagcanaaaaattcagcaacacaaaacaatgggttctcttatggcaggatggtattctacccacatggatcctcaatcagccacacttaaaaggaaccgctcactcactaaggatgaaattgatgcttactggaaatcaaagaagaagatagaggaagaacaccttagagctatttccaatgtgtccagagactattcaggctagcaaaaacacagagcctgaaagaagttgcaggagtc

SEQ ID NO: 729 - DNA, 290 bp, Glycine max
  unsure (1)..(290): unsure at all n locations; Clone ID: 700554214H1
taacaaaacagagcaaagagagagtgtgtgaaaagtgaaacaaaaaacagaacaacaatggcgacacttaaggttcctcagcctcttccccccgttgcagatgattgtgagcagctccgaaaagccttctcaggttggggaactaacgaggagctgattgtatcgatcttggctcataggaatgctgctcagagganactatcagagaaacttatgcccagacctatggagaagatctcctcaaggccttggacaaagaactcacgagtgattttgagaggctggttcac

SEQ ID NO: 730 - DNA, 197 bp, Glycine max
  unsure (1)..(197): unsure at all n locations; Clone ID: 700554215H1
tttgcacacagcggtcttggaaacgtccttatggggttggactcctggtagctggattagatgaatcaggagctcacctctattacaactgtcccagtggaaactattttgaatatcaggctttgctattgggtctcgctctcaagctgctaagacatatttggaagcagtttgaganttcgtgggttctcgagaga

SEQ ID NO: 731 - DNA, 291 bp, Glycine max
  unsure (1)..(291): unsure at all n locations; Clone ID: 700554216H1
tctttcgtttcgatcttcgatctctgaaaatgagagagtgcatttccaatccacatcggtcagggccggtnttcaggtcggaaacgcctgctgggagctctactgcctcgnacacggcattcagcctgatgggcagatgccaagtgataagactgttggtggaggtgatgatgcttcaacaccttcttcagtgaaactggggctggaaagcacgtgcctcgtgcgattttgtagatctcgagcctactgtgattgatgaagttaggactgggacataccgccaatatttca

SEQ ID NO: 732 - DNA, 263 bp, Glycine max
  unsure (1)..(263): unsure at all n locations; Clone ID: 700554217H1
gaagtcgcaaggnngtgcaanntggctgatgcaggnnnagaaggancatcttcttccacggtaggccaaattgacgttttctggcacgaagggatgctgaagcatgacacgggcaatggcgtgtttgacacggggatggatccaggcttcttagaggtgttggagaagcaccctgaaaactcagacagagtgaaaaacctagtgtctatctcaaaaggggtcctatctccccttacatttcttggcacctggtacacctgcaa

SEQ ID NO: 733 - DNA, 273 bp, Glycine max
  unsure (1)..(273): unsure at all n locations; Clone ID: 700554218H1
ttgaaattggaggttcctaaggctggagagacgcctgattcagaaccaaagaatagaattggtgctttggtgcaactaattaagccgagcctagtggaggccgttgactcgtctggcttaaaagatctgtttgaaaatctggtgtctaatgatggaagtttgacacatgaagatccagctagagacagtctcaccgatgaccatagagggtgaaattggtgcaaatgcaccattctatgtgattcatctaaactacacaaanatcgtcatgtg

SEQ ID NO: 734 - DNA, 287 bp, Glycine max
  Clone ID: 700554219H1
aataatcgcagaagcagtttccggtgcatctcatgcgtcttccaaaatgaacgacgcagatgtctcgaagcaaattccagcagatggtgcgtttcatccgccaggaagctgaggagaaagccaacgagatctctgtatctgccgaagaggaattcaatatcgagaagctgcagttggttgaagccgaaaagaagaagatcaggcaagaatacgaacgcaaagagcgccaagtcgaaattcgcaagaagattgagtactcaatgcagctgaatgcttctcggttaaag

SEQ ID NO: 735 - DNA, 282 bp, Glycine max
  unsure (1)..(282): unsure at all n locations; Clone ID: 700554220H1
gaagatntattatggcattctctatcttcaaacatgttctgtcgttattcnttcgtnagcatntncttncaggaacctaccantgccctagaaaganctanattgtgtacatgggaggacattctcatggtccagacccttttcctagtgatcttganacagccacaaattcccatcatgatttactcgcntcttacttaggaagtcacgaganggccnaggaagcaatatatactcgtacaataagtacatcaaggcnttgctgccctacttgaagaggaa

SEQ ID NO: 736 - DNA, 290 bp, Glycine max
  unsure (1)..(290): unsure at all n locations; Clone ID: 700554221H1
gaacctaacccaagacgagagaatagaggaagcttggggtttgaatcgaatcgaatcgaagcgattcatncgatcgatcgatggctcttgtaggagttgaactgaagcatncggcggagggcgtaccggaggcgaattgctnccgccaagcccaccaagcagggagagggcctccgccactactattctctcaacatccacgagcatcagctccttcttcgccaaaagactcataacctcaaccgtctcgaggcttcagagaaacgacctncatnctagggtgaggatgc

SEQ ID NO: 737 - DNA, 277 bp, Glycine max
  unsure (1)..(277): unsure at all n locations; Clone ID: 700554222H1
gnttgacaaaagactttctggaaaaaggacgttcattgtacttgatgacgtgaatgagttctggccaattnnaaanccctatgtggaaatcgtaantggttcggtcaaggaagtgtaataatcattacaactagagatcgacgtctgcttgaccaacttaaagttganntgtttatgatgtggataanntggacgaaaacgagtcccttgagctttttagttggcatgcntcnatgaagcnntaccaanacnngnttnnaatgagctgcanganagt

SEQ ID NO: 738 - DNA, 286 bp, Glycine max
  unsure (1)..(286): unsure at all n locations; Clone ID: 700554223H1
cctaaacctacccatatttgcttttgcaccaaccaatgcatgggtcattgcacttagtcttcaatgccccactttggataaagaaatagaaggagaatatagcattgaaagcaaaccgatctcaatcccaggttgcaaatccgttcacccccttgatttgattcntatgttgcgtgacaggacacaaagggtctaccatgaatttgttggcgtgtgtgaaggggcagcactggctgatgggatatttgtgaacacgtttcatgattggagccaaagacattgaagc

SEQ ID NO: 739 - DNA, 289 bp, Glycine max
  unsure (1)..(289): unsure at all n locations; Clone ID: 700554225H1
gttttggctcccttcgttctcgctgggcccatggaactctggattcacgacgccaacgacatgcgactcctcccttccccatgacgtggatgctggtgtgttgaagaaagtggtgttggctgagggagcagcggttaccgtcaaaggtgcaagatccgttagtcttcggcnacctcttgatttccctcttccgttaaaccgaacggagaatggttttgctaacggtcttttaactttggctgagcatcttcgccatgcttctagaacccaggttctccgattctctcgc

SEQ ID NO: 740 - DNA, 289 bp, Glycine max
  unsure (1)..(289): unsure at all n locations; Clone ID: 700554226H1
tgcaattgaagttgaagtcttgcccttctctcttcaactccaaacacaagacatcatcatccatggcngcctccgtctccactgtcggagctgtcaacagagctcttttgaacctgaatgggtctggacctggggtttcagctcccagttcatccttctttgggagcagcttgaagaaggttattggctcaagggtccccaacacaaagattncctctggaagcttcaagatgttgctgtagaagagaagaaagagatgaagagacccagcagaccggacaaggacaga

SEQ ID NO: 741 - DNA, 288 bp, Glycine max
  Clone ID: 700554227H1
gtgaagctgaacgtggatggttcacgcgacccatacaaaagttcctccgctggttgtggtggtgttctgagggacgcatcagcaaagtggctccgtggctttgctaaaaaactgaaccctacttatgcagtgcaccagacagagttagaagccattctcacgggcttgaaggtggcttcagagatgaatgttaagaaactaattgtggagtcagacagtgactctgtggtgagcatggtggagaatggggttaagaccaatcaccctgactaggtgtcgtggaactta

SEQ ID NO: 742 - DNA, 289 bp, Glycine max
  unsure (1)..(289): unsure at all n locations; Clone ID: 700554228H1
gtaatggcttcgtcgcgagtngatctggatgggaaccccataaagcccatcaccatttgcatgattggcgccggtggcttcattgggtcccacctctgcgagaagctcatgtcggagacccctcacagtgtcctcgccttggatgtctacaatgacaagatcaaacacctcttggaaccccacacgctcccttgggcctctcgcatccagttccatcgcctcaacatcaagcacgattcccgtctcgaaggcctcatcaaaatgtcagatctgactattaatctggctg

SEQ ID NO: 743 - DNA, 295 bp, Glycine max
  unsure (1)..(295): unsure at all n locations; Clone ID: 700554229H1
tctattattccattctggatccgttgtctccagtgctttcgaccgtttgcttgnaagnaagaaatacaatggcatggngtcaatgggctaaaatacatctcaancngtantgagcacttgnccttgaggncttactaatgagttnccgtagaggnatggnttgggcaattcccagctggaancttcttnnaacattgcaagnattgtaaaaacntaatngggaaacngnccnagattgggnttncccagaaaggaattcaanaaanccggnttagannaaaaccccngaacnnac

SEQ ID NO: 744 - DNA, 298 bp, Glycine max
  unsure (1)..(298): unsure at all n locations; Clone ID: 700554230H1
gggcaagagacaganagaaggacacggttcgangctggacccggcggcatggcccaacaagcgaaccagcaatacgcnnnnnnnnnnnnnnnnnnnnnnnnnnnngcctacatgatgatgccgccgcagcctcagccccctacagatgtgggccccatcggcccagcctccgttcccaattcggtagctacctccggcaacccaccagcgccgatgaggtccgttaccctactggatcggcganttgcatnactggatgggaganantatctctatgacctgtttcgcacacaccggc

SEQ ID NO: 745 - DNA, 291 bp, Glycine max
  unsure (1)..(291): unsure at all n locations; Clone ID: 700554231H1
cttgtgaatcagcaccacattcacctgagctttttgtgaggatnccaaagcatggcttcccttgcagcatccactgctgctgcttcccttggcatgtcagaaatgcttggaaaccccatcaacctcagtggtgccacaaggccagctccatctgcctctagccctgcctccttcaagactgtggctcttttctccaaaaagaaggctgcacctccaaaaaaagctgcagctgctgctcctgccaatgatgagcttgccaagtggtaggtcctggacagaaggatcttcttg

SEQ ID NO: 746 - DNA, 285 bp, Glycine max
  unsure (1)..(285): unsure at all n locations; Clone ID: 700554233H1
anggttttgaaaaggatganaatgagtccagtgttagtattnctgttgttggagcctctggagaccttgctaanaagaagatatttccggctctctttgcgctttactatgaggattgtctccctaagcacttcaccatctatggttatgcacgaagtaagatgactgatgcagaactgagaaatatggttagcaagaccctcacttgtagaattgataagagagagaactgcaatgagangatggaccatttctaataagatgtttctaccatctggtcaatag

SEQ ID NO: 747 - DNA, 283 bp, Glycine max
  unsure (1)..(283): unsure at all n locations; Clone ID: 700554237H1
ttcaggnaccggangttcaggttctggacccttcagatggtgctgttggtgtaaatgatagtgcaagtgcataatgaggttagcgatgctgatgaaacatttgcttcacctttcttagtgatacttcaatcgtacagagaagcattggctaataatgacgaagtcaaaattgctgagttggaatcgtcattaaaatccattgaagatgagaaaatagaacttgaagggaaaatagcttctttatcagaggagttatcaatagaaaaggatcggatctaaggat

SEQ ID NO: 748 - DNA, 262 bp, Glycine max
  unsure (1)..(262): unsure at all n locations; Clone ID: 700554239H1
ggcctggttcccattgttgancctnanatncttgttganggnacttntggaattcacnagtntgccggcggtaacggagcgngttcttgcancanggtaaaaaggnttgganngntnacaagtncttcntgaggnaacctaatggangcaaanantgncaacccttggntccaattnngttaagntttccctaagttgttngcggagaacatgtaaagccttcanagaacgtggctnctggaatcctgtggcggtttcttgt

SEQ ID NO: 749 - DNA, 242 bp, Glycine max
  unsure (1)..(242): unsure at all n locations; Clone ID: 700554240H1
attaagtggccacttaattatatttccagataggaaaaggagaangtgaacactttgatgatggatggttgaaaatttgcatgattttttggcaaatgatttaggcaggctgcttggtacctaattattttgactagggaggcttaatgaatatctgttctaacttcttaagtgttttagcctgtatttttattttatggtgtaataactttgtaatatagggattttttacatgttcctat

SEQ ID NO: 750 - DNA, 289 bp, Glycine max
  Clone ID: 700554241H1
gggctaccagaagtcaagaccaatgaagtgccaaaagaaaacattctggagaagccagaaaagcctgagagcacttcttccccctagagcttcacatacagtaatttcaagtaccgttaagaaacctattggtgctaagaaagcagtgaagagtgggggactcggcgctcgtaaactcactaaaaagccaagtgagtctctctatgagcagaagcctgaggaaccccctgctccagtttcatctcaacaaacaatatgcctgctgggccatctccaagtctcggtttga

SEQ ID NO: 751 - DNA, 210 bp, Glycine max
  Clone ID: 700554242H1
ttgaaaattcattttcgagaacctgcacagtttctttcattttatcttgttacaaggtcatgacaaaagacaacaatggatacctcagtgccctacactggggcaataagaggcaccgtgcataagcctcaagcgaacctaggggcagatcagaagttctcacttggtaggtcgaaaacccgaaagggcggcctaggaaaaattggggtt

SEQ ID NO: 752 - DNA, 144 bp, Glycine max
  unsure (1)..(144): unsure at all n locations; Clone ID: 700554243H1
gncggagtctcagagatnaattccnacgncctttntnaccanaacctancanctcgtcgacgaccaatccatcgacgacgntatntcctggaangacgacgggtcaacgtntatcgngctggnaccctancgttttngccatag

SEQ ID NO: 753 - DNA, 284 bp, Glycine max
  unsure (1)..(284): unsure at all n locations; Clone ID: 700554244H1
gtacagataagaggagagccatcttatatcagcaatatgttaaaggtatatcaacaactgggatgcaatctaactatggtttcgntggtcaactcaatgcatgttggacacataaaatgactgaaacagagattgaggtgatcaaatctgcaggttttcttgtttcagtcatccatggcaggcatgatataattgctcagatatattatgcaaaaagacttgctgnaaggcttcatccagtggctagaatggtagatctncacggaggtcantantaagtcaga

SEQ ID NO: 754 - DNA, 283 bp, Glycine max
  unsure (1)..(283): unsure at all n locations; Clone ID: 700554245H1
gtacaagtagaaatgatgcatggactccttcacaatcaggaataggagaggatattcaaggaatggatgatttgaacctgatgatccaaatccggctcaggattcctcttcctctacacagaaagttgatgaacgtagtaaggnacaggtggangattttnatcttccggatttcgaggttgtggataaaggggttgaggttcaagagaaggaacnngatggaggagaggaagctgaggaacctatncaggaggaatcaacttcaanggaagttgncaatncg

SEQ ID NO: 755 - DNA, 285 bp, Glycine max
  unsure (1)..(285): unsure at all n locations; Clone ID: 700554247H1
tagtttcttacaaggctctactctactgcttcaccttctgctcnagaaaattcagtggtgatacatggcttcggctactctctctgtagccaaaccagcccttcaggcaaatgggaaaggctctctgaattctctggcctccgcagctcatcaggcttccttcccttttctagaaaatcnccagaggatttccattctgtcattgccttccagaccaatgcagttggaagcagtggaggatacaagaagggtgtgacagaagcaaaactgaaggttgccataaac

SEQ ID NO: 756 - DNA, 285 bp, Glycine max
  unsure (1)..(285): unsure at all n locations; Clone ID: 700554249H1
tngngcngcccacgccagcagttgantgcgcccagggcgccgnaagnnccngcagcnaacngccgcaaagngngtttggcctcaccggantcatacgcatggtcgntttctggtacttcgcttccaaattcttttcccccannaaacctaccgaaccttccgctctcatctccaatctctttcagaaagcacngcctctggatatgtggctttatctctccgagcacgagaagttcaatgannttngcngtgaaagttcncttgnatggcatganaccatgntcc

SEQ ID NO: 757 - DNA, 270 bp, Glycine max
  unsure (1)..(270): unsure at all n locations; Clone ID: 700554250H1
tcactccttgctcttagccctcctcctcttcgccgcngtnncctcccgccgagatggcggtggccgcgtccgangccgacgacatcctgatccgtcaggtggtgccagatgttggcgaacgcagaggaggacaacctgctgaacgccgancaccacttcgcgcgctnanatggccaagttcgccaagacctacgccaccaaggtaggagcacgatcatcncttcggcgtcttacaatncnaacttcgcagagccaggctgcacgccaagc

SEQ ID NO: 758 - DNA, 280 bp, Glycine max
  unsure (1)..(280): unsure at all n locations; Clone ID: 700554252H1
tggattcaatggacaagttcgtgcttcagtgccttgtcttttatcagaaaganattgccctgtacacagcctcaaaatttaatggtgatttttgctggtttgatattgacggggatattgatgctctttttaaggaatactggtgcaagaaattgcatccaaagaatgtatgcgaaaaggttttcaggcaacctcctttacgcgagtcctttaagaaagggaaagctaaaaagcaagagtttactattaccaagcagaaggctgctcttctacaggcttc

SEQ ID NO: 759 - DNA, 281 bp, Glycine max
  unsure (1)..(281): unsure at all n locations; Clone ID: 700554253H1
tgttcaatcccatgcatcanaatcccaacatgttcttcttccccatcttgnacttcatnatcaacttcatcctantntttgaggtttncttctnccaagcctcacagtgtcactataaggaattctcaagctgaagggcctataagaaggccagtggcaccttcannaagagannnnnnnnnnnnnnnnnnnagtgcccctcagcttcagaagccaacacttccttctcagcctccaccatccccttcacccccacagaagccagctacttgnnnnnggag

SEQ ID NO: 760 - DNA, 281 bp, Glycine max
  unsure (1)..(281): unsure at all n locations; Clone ID: 700554255H1
tctactctctcacttctntctatcacattttacttgcaaganggcagcgtcatcagcatgccttgtagggaatggtttatctacacggggtaatagaataactctcaagaaggacttcaatggaagatatctctactcaccttggngactttcatcattgaacaataaggcatcagaagcattttccataaagtcttcctggagcanaggcaacaacaaganngganannggggtttctaaaactgttgcttggaaatgtgggattnntttncctgcacta

SEQ ID NO: 761 - DNA, 284 bp, Glycine max
  unsure (1)..(284): unsure at all n locations; Clone ID: 700554256H1
ctagatancatctctctaaatttctcatcttctcctctgcccccatcaccttgatctgtctgtctatacactcattgtttgacaaaaaacaaaatatatacacccggnagtnttgtcatagctgagagctgactctagctagaggataataagattacaagagagaggaattgtttntgattggatccacaaaattcaagatgactccagtnaatttggcaggccagtttggtgacacgacatacactaaggtgtttgtnggangctggcctgggagactcaaa

SEQ ID NO: 762 - DNA, 281 bp, Glycine max
  unsure (1)..(281): unsure at all n locations; Clone ID: 700554258H1
tttaccccattttctctaaatccaaacaggccccaaaagaaagagagggaaaattctcttccatggcctcttcacgccctgccaatgtgggaatccttgccatggacatctacttccctcccacctgcgtcacccaggatgctttggagggtcatgatggggtgagcaaagggaaatatactattgggcttggacaggattgcatggncttctgctctgaggttnaagatgntatctcaatgancttgacggtagttacttcacttcttgaaaatttnagt

SEQ ID NO: 763 - DNA, 228 bp, Glycine max
  unsure (1)..(228): unsure at all n locations; Clone ID: 700554259H1
tgctcagtgatacccttttcttagaacaatgagagangggnaagggagttcaantngaggannactncgacgaagaagatccgggnncttccaanaannatggcacttgnctcngcccctagcnaccgacngagtggaaanccncatncgcacaggctagtgcgangcttncgagaacnttctttgannaagcagttgnagagncagcaaatgaactctgcngttccc

SEQ ID NO: 764 - DNA, 264 bp, Glycine max
  unsure (1)..(264): unsure at all n locations; Clone ID: 700554262H1
caacacttccatatcttatcttctccncctccatctttgaggttctcacgganacttctgaagatggctggcatagcattcggaagcttcaatgattctttcagtttggcctccatcaaggcctacattgctgagttcatctcaacccttctctttgtttttgctggtgttggttcagccatagcctatgctaagttgacatcagatgcagctcttgatccaactgggttggtagctgttgccattgccaggttttgctctctt

SEQ ID NO: 765 - DNA, 186 bp, Glycine max
  unsure (1)..(186): unsure at all n locations; Clone ID: 700554264H1
tgttttacaccatctatatgcttggngtctaatatacattagtcccattcatttagaacaacacttcacatgatttaacatgagttttacaccatctatatgcttggngtctaatatacatattttaaaatgatgtttccctttcttccccggttcaaggaacgatgttaagtgatctaacatccc

SEQ ID NO: 766 - DNA, 267 bp, Glycine max
  unsure (1)..(267): unsure at all n locations; Clone ID: 700554265H1
cttcttacaaaaccttaggtcagatttctgggnttgnnttttctgataatctggagtggagctaagtccaagatgccgtgggtttccttgtttgtggatcacaaaagaaattgtgttcgcttggtggtgttttttcgtgtgattctgtaatttaattgctcaggtgtagtcccattaggttgcaaagcaactcttttcatagctgttctcctttcattccaaagctgttagggggatgaggagtactttgcnataacaataaagaga

SEQ ID NO: 767 - DNA, 279 bp, Glycine max
  unsure (1)..(279): unsure at all n locations; Clone ID: 700554266H1
ganaaattggaaagagtacaaatttaagaggaaagataacattaccaaccttgggagctggcgaacaagcatacgatgttaattttgaatgggacagtgacttcggaattcccggtgcattttatattangaacttcatgcaaaatgagttctacctcaagtctctaattctcgaagacattccaaaccacggaaccatncacttnntatgcnactcctgggnttacaattcagaaaactacaagactnctcgcattntctttgccaacaatacatatc

SEQ ID NO: 768 - DNA, 279 bp, Glycine max
  unsure (1)..(279): unsure at all n locations; Clone ID: 700554268H1
ttactgactctctttgtcaccgggtttgtgagatgtcggatgcacnggcgagtccgagtccacgagagtggtggcgagcagagccctcgcggctcgttgtccggcgcggctagagagcaggaccggtaccttcccattgccaacatcagccgcatcatgaagaaggctctgcctcccaatggcaagattgcgaaggatgcaaaagacacaatgcaagaatgcgtttctgaattcatcagctttcattaccagcgaggcgagtgagaangccagaaggag

SEQ ID NO: 769 - DNA, 278 bp, Glycine max
  unsure (1)..(278): unsure at all n locations; Clone ID: 700554269H1
cnaggtggggtccacagagctgtggtatgtgatcaacttgacggaggataatcacccgcttcacattcatttgggtttgttcaaggtgttggatcagacggaactggtgaaaccgcatgatgagtttacggaatgcatgacgacaatcaacgatgcggtgaagtgccacgtggacaagtncgcgcgtggcannatnatagangtgccaacncatntnaaagggtnaatagctgcgttcacnctggtgcccgngcagtgacnaacgttactctnaagnt

SEQ ID NO: 770 - DNA, 219 bp, Glycine max
  unsure (1)..(219): unsure at all n locations; Clone ID: 700554271H1
ccntcattagcgtcgttatcaggtggcaacaatgtgattgatacctgcgggtcgtaatctnaaccntggttctgcttcntntcgggcttctacttctgtnangcctgcngncatcagcaccaatccagccagntctcagcaacaaatgcagcgtgatcagcagtnagcngcnaatntcnttcancgtcannnctcnnagtcgntntngagcngantgtg

SEQ ID NO: 771 - DNA, 282 bp, Glycine max
  unsure (1)..(282): unsure at all n locations; Clone ID: 700554272H1
tccttcacaacgtgttccaagacagtggtctaanaatgatcttcgtgatngaaccatatataaagattctgagtatctggagtttcttgaactacttgccaagcctgttgagaatcttcccagtgccgagatacaattggagaagagggaagcagaacgatctggtgctgcaaaagatattcctatnattacaccactgatggactttgtgcgccagaaaagagctgccaagggacctaggaggccactgtcaaatggntaagtgagtagaagagctggcac

SEQ ID NO: 772 - DNA, 274 bp, Glycine max
  unsure (1)..(274): unsure at all n locations; Clone ID: 700554273H1
tcnttgcnangatttgggtgnttnnaangcttcnaattatggaancnacangnacggataanttggaggcaggaacagtttcaagtnatgncaggnaaagtgaantcaaggcatttgatgattcaaagactggtgtcnaaggactggtagaaaatggtgtaacaaaagttccacttatgttctnggnngaaaactctaatctcatgatggcgtaacggtgctcatntcnaagatcagcatcccntattggcctcacggcatcngntgacctatt

SEQ ID NO: 773 - DNA, 281 bp, Glycine max
  Clone ID: 700554274H1
tcgagataactagaaacagtgtgatgaaaatgaaggtccttgttttcttcgttgctacaattttggtagcatggcaatgccatgcgtacgatatgttccctctccgaatgaacactggctatggtgcccgtactccggaggtgaaatgcgcaagttggaggcttgctgtggaagcacacaacatctttggctttgagaccattcctgaagagtgcgttgaagcaacaaaggaatacatccatggcgaacaatatagatcagactccaaaacagttaaccaa

SEQ ID NO: 774 - DNA, 117 bp, Glycine max
  Clone ID: 700554275H1
tttccttaaaggattccctcctaatttggtgggattatcccaagtttcagctgctaccactcatcagcattgccatttcctgtttcactcaccacatggaaaagcttattcgcatgt

SEQ ID NO: 775 - DNA, 281 bp, Glycine max
  unsure (1)..(281): unsure at all n locations; Clone ID: 700554277H1
cncaactcaatttttctctcaaccggcccaatttagcataagcccagcatggccaccgcaacagcagcagccacctncgtccttcatggggacgcgcctcctggaggcccactccggggcggggcnggtgcaggcccggttcgggtttggcaagaagaaagccgccgccccgaagaaagtttccagggggtcgggctctagctccgataggcccctgtngtatccggnnnccaaagggcccgagtaactgggatgggagcttgtcgnntttacggattcac

SEQ ID NO: 776 - DNA, 277 bp, Glycine max
  unsure (1)..(277): unsure at all n locations; Clone ID: 700554278H1
gggctgcgcgggataattgtgatcactcatcaaattaatatttttttggtaccaacttcatcaagttattgtttttttggtacaaacttatcagattaatttgaaactagcgtcacttgattgtaccatttgttttctggaatgaatcctttctcatgaagtgataagattatgagaagagaggtagatncaaagccctaaatagtaacttgaaactttgtttataaggtcaacttattaagatgccttagttggatgtttcttattccctgaaaaa

SEQ ID NO: 777 - DNA, 281 bp, Glycine max
  unsure (1)..(281): unsure at all n locations; Clone ID: 700554279H1
aagaatggtacttcttttctcctcgggatcggaaatacccgancggttcacggccgaaccgtgccgccggaagcggtattggaaagccaccggcgccgataaggcgatcggaaaaccgaaagcgctagggatcangaaagctctggttttttacgccggaaaantccccaaaggnnngaaaaccaattggatcatgcacgaatatcgnctcgccaangttgaccgatctgcctccanggaaaaacaacaacaacttgaggctgntgattgggtgttgtgtc

SEQ ID NO: 778 - DNA, 277 bp, Glycine max
  unsure (1)..(277): unsure at all n locations; Clone ID: 700554280H1
ctgaacattgtcccaaccagcactggagctgccaaggctgtgtcactagtgttgccacagctgaagggcaagcttaatggaatagcgctccgtgtgcctacacccaatgtttcagttgttgaccttgttgngaatgttgagaagaagggtctactgctgaagatgtgaatgcagcattcagaaaggcagctgagggtccactgaaaggtgtgttggactgtgtgatgttccactgtgtctatcgactccgctgctctgagtttcctctatattgact

SEQ ID NO: 779 - DNA, 275 bp, Glycine max
  unsure (1)..(275): unsure at all n locations; Clone ID: 700554282H1
aacaactttgcaatttcgtaggagatgctcaggagcagcacgctaacacanatgttacagtcacctgtgttcgtcacagtcacagacaatggttccaatcaattcccgtaaattatagattctttgacgctgctcggaactctctatcatcacccaactccgcgatcttcaaatagagaagaaaggccaattataaccgtcatagttctggaatggggaccttcaccactcgcgcgttggcgcagcgctttcanaacgccgacgaactcntcgac

SEQ ID NO: 780 - DNA, 272 bp, Glycine max
  unsure (1)..(272): unsure at all n locations; Clone ID: 700554283H1
ctcccatctcacacacccctcgcatccaacaatgtctctcaccattccctccaacnttctccaagcccgcngccctccgccccaaactaagcccaaagctaaggtccgccgccacaaccaccatcgtctgnnnnnnnnnnnnnnnnnnnnnnnnnnnnnnngtgtcctccgacctgaaggcgttctccgccgcgctggccctctcctccatcctcctcttccgcccctctcccgccggcgccggacatctcggggctcaccccatgcaagga

SEQ ID NO: 781 - DNA, 276 bp, Glycine max
  unsure (1)..(276): unsure at all n locations; Clone ID: 700554284H1
ggggactagtaagattgaaatcatatgtatgantttntcctcatttggagaagaagtagaatgggatgganatgccttcaagaagatganaaatctcaaaacacttatcatcaagagtgnttgtntttccgaaggtcccaagcatcttcctaatactttaagagtattggaatggtggagatgtccttcacaggattggccacatnattttaacccaaagcnacttgctatatgcnagttacccgatagtagctttacatcagtcgggntggcncc

SEQ ID NO: 782 - DNA, 277 bp, Glycine max
  Clone ID: 700554287H1
tgtgacaccaaaaggattcatcatagggcttggttgaggtccatagccaagtgaagcttgattttgtgacatctgactcaactgattaaaagcattatcatactgcacaaatggatgtcgaacttgttgcaaattaaaaggcatcaagttaacagaagaagttggaatactcctagcatacctttcatagttacgatcataatctggatcactgcgatcctttccctatctctcaagatggcaactcgagtagattaatatccctaccaatagagca

SEQ ID NO: 783 - DNA, 265 bp, Glycine max
  unsure (1)..(265): unsure at all n locations; Clone ID: 700554288H1
gaaaagtgatggaactttgacgccattggccattgagttaagtaagccgcatcctcaaggtgaagaatatggtcctgttagcgangtctncgtgccttcgagcgaaggagttgaagctatatttggttattggcaaaggctatgttgttgtaaatgactcgtgctaccatcaactcgttagccatggctaaacactcatgcggttgttgagccatcgtcatagcaacaaataggcatctgagtgtggttcaccctattacaaact

SEQ ID NO: 784 - DNA, 261 bp, Glycine max
  unsure (1)..(261): unsure at all n locations; Clone ID: 700554289H1
gttctgaacatggagctgttgtctannagactcaacccttcagncttctgcttcgacttcaacgcttcctgcagcacttgctcactgctccaagctatgtgagtttcaaccgcggaagnagaagaaggtgtgtttcgacgcgtntaggcttgcggtgcggtgtntgaaagcctcggcgcagcaaatccggtgatactcatcgacgatggagngancggactngnntcaccanacctgccanggaagncaacacnncnatcg

SEQ ID NO: 785 - DNA, 279 bp, Glycine max
  unsure (1)..(279): unsure at all n locations; Clone ID: 700554290H1
gttctcgtaattggctacatagagttccagaggaacgcagagctggacccagaaaagaggctgtacccaggtggcagttacttcgacccactgggcctggcctcagatccagagaagaaagccacccttcaattggcggagatcaagcacgcccgtctcgccatggtgggcttcttgggctttgcagtccaagctgccgccactggcaagggcccgctcaacaactgggccacccacttgagtgacccatccacacaaccatcatgnacacttctcatc

SEQ ID NO: 786 - DNA, 274 bp, Glycine max
  unsure (1)..(274): unsure at all n locations; Clone ID: 700554292H1
ctcccatctcacacacccctcgcatccaacaatgtctctcaccattccctccaaccncttccaagcccgctgccctccgccccaaactaagcccaaagctaaggtccgccgccacaaccaccatcgtctgnnnnnnnnnnnnnnnnnnnnnnnnnnnnnnngtgtcctccgacctgaaggcgttctccgccgcgctggccctctcnnccatcctcctctccgcccctctccccgccggcgccgacatcttggggctcaccccatgcaaggagtc

SEQ ID NO: 787 - DNA, 276 bp, Glycine max
  unsure (1)..(276): unsure at all n locations; Clone ID: 700554293H1
ttacaaaggttgctgtaggagataagattgcagtagtgctaagtgctaacacctgcagtgaacaatgggcctctgcatcagcatctctgctcaagtcttcacttgttcttgacaagtctgagtgggtgaagggacaaaccctcgccaaccttctgcatcagttgtgagatgcaaccccaccaccccatcaggcctcaccatcagagctggttcctatgctgatgagctcgttaagaccgcgaaaacatggctcaccaggatnggtntttggccagg

SEQ ID NO: 788 - DNA, 279 bp, Glycine max
  unsure (1)..(279): unsure at all n locations; Clone ID: 700554294H1
tnatcttatcttagcaatagctacccctatcacaacaatactctattaggcaaaaacaccaaatgggagaggnaaaagagcagcctaagaatgaaaccgagaagaagcccgaggnggccgccgcagcccccaagaaagacgacggacccatccctgtcgtttacaaactcgacttgcattgcgaggggtgcgtcaagaagatcaaacgcacatgtcgccatttccaaggtgtggaaaccgttaaggcagatctatcgtcgaacaaatgatgttacggca

SEQ ID NO: 789 - DNA, 279 bp, Glycine max
  Clone ID: 700554295H1
tattgctctgagaatttcctcataatttcaacggatttatctgaaggttccgctgaccataaagatacgttgggtgcaccactgtgcccttgccggcattatgatgataaagctgctgaggttgcacaaggattttggaattgcccttgtgttcccatgagagagaggaaggaatgccactgcatgctatttctcactcctgataatgatttgctggcaatgaacagactatcaccttggatgaaataaagaatcaacagccaacatgtaacagattat

SEQ ID NO: 790 - DNA, 279 bp, Glycine max
  unsure (1)..(279): unsure at all n locations; Clone ID: 700554296H1
gcactgagggttaaggttcttgtcagcattggaaacangaacaaacaatttcctttcaccattggctcggactcgaacagcgaacatgggtctccgaggccactgcttcgctgaagagcatcattaaaacctacaaccttgatggcatcgatgtcagctacgaggncatcgccgccaacgaagccgactttgtnaattccgttggggggcttgtgaggaacctgnagcagnacgagctncatactgtggcttccttcgcaacaagcgctgatgccgcca

SEQ ID NO: 791 - DNA, 296 bp, Glycine max
  unsure (1)..(296): unsure at all n locations; Clone ID: 700554301H1
agtgtatctagtatgatacagtgtgattacatgtaaattaagtgtagaagctgatgtgttcctggatgaaatagatttagcaattgttgggaatgtacatgagcttttctagaacagctgattttaacccagattagcatgattgatagaaaatgttgattgtagcataggataccatatcctctatctttgtagtatgttggtctccgaaatttcattcctttgtaattagatattgtaagacaataatgtgccagtaactaattttatgcttaaaaaaaanaaaaaaaaaaggg

SEQ ID NO: 792 - DNA, 295 bp, Glycine max
  unsure (1)..(295): unsure at all n locations; Clone ID: 700554302H1
gcattgaccctaaatataacgatcaacaattaagagcaacagtaaatcttcctaagggaanccggaanacccgttaaagtggctnttacttactacaangcgaaaaattcgatgangcaaaaaatgccggagctgatttggtgggtggagaggntctgatagaacagataaaagcagggttcatggagtttgataaactaattgcttctccagatatgatgcctaaggntnctagcctagggnagatctgggttcagaggacnntnccatacccanaagctggcatgtaacacca

SEQ ID NO: 793 - DNA, 297 bp, Glycine max
  unsure (1)..(297): unsure at all n locations; Clone ID: 700554304H1
taggagctcttctnccattggttctncatctgcanccacnnacttngcatagttttngngaccaagaatttttgcaagggtagcatcaacaagaagttctngaaatggagatcaccaatgtcagcgagtatgaagctattgcaaagcagaanttgccaaagatggtgtttgactactacgcatctggngcagaggaccagtggactctggcaggagaacagaaatgccttttccagcaattttgtnctcggccagtattcttcttnatgtgagccagatanacatcacaactnctgt

SEQ ID NO: 794 - DNA, 289 bp, Glycine max
  unsure (1)..(289): unsure at all n locations; Clone ID: 700554306H1
gttgtgtttgacgcactgtgtaatgctatctacgatggctctctctgcgcatatttgccgtttccccgccacgcgcgctgacactgctttgccggagactctcaccagaatccggtgccagangcctctctctgtccgatgctctggcgattccccttccggctctgtgggttcggagttcgatccgaaggtgtttcgtaagaaccttactcggagtaagaattataaccgcaaaggatttgggtacaaggaagngancctccaactcatgaatcgcgagtacaccagt

SEQ ID NO: 795 - DNA, 114 bp, Glycine max
  unsure (1)..(114): unsure at all n locations; Clone ID: 700554307H1
caatcgccgatttcaccatcattatnattataattacaatnatnattatnttctcgcncganttgtttcaatnacgacatagtcgcgataattgccnctttnttnttntggggg

SEQ ID NO: 796 - DNA, 290 bp, Glycine max
  unsure (1)..(290): unsure at all n locations; Clone ID: 700554308H1
aacaaaacaacccattgagagcttgcacaactctcatggtagtagtagcactactacttcacacactctctctctgantgcctcacaccacagattctgtgatatatataccaatggaggtcctcaatgctgctggcttgacccctctatctgtgctctctgatacaaaaacaacaagaactaaacacccttctgtttctgtatgcaaagtctcaaacttttccacctcaaccaacaatccacaaaccttgcngcaaagttgcatatcaaaaactttgcatggggggctg

SEQ ID NO: 797 - DNA, 291 bp, Glycine max
  unsure (1)..(291): unsure at all n locations; Clone ID: 700554309H1
tcttttcattcctttcttttcttcaaatcaaggnactcagctatgactaccagagaaatccttcaaaagatgaaggtaaaagttggtttnggttcatcagaccctgactcagggaaaggaaagagcaagatgtcaaagaacataactcatggttatcatttggtgaaaggaaaatcatatcatgacatggaggattacgttgtggctcaatttaagcaaatagataacaatgaattgggtttgtttgcaatattcgacggccatgcgggtcagaacgtacctaattacttg

SEQ ID NO: 798 - DNA, 289 bp, Glycine max
  unsure (1)..(289): unsure at all n locations; Clone ID: 700554310H1
ccagaatccgcgccgccattcccaccatncaaacatctcatccaaaacggcgccaaagtcattctctccagccacttgnggcggccgaanggtgtcactcccaaatacagcttggcgcctcttgtaccccggctttctgagctcattggtatccagattgtcaaggccgaggacagtattggtccagaagtagaaaagttggtggcttctctccagatggaggtgttctcctctagaaaatgtgaggttttacaaggaggaagaaaagaatgaccccgagcatgcaaaa

SEQ ID NO: 799 - DNA, 279 bp, Glycine max
  unsure (1)..(279): unsure at all n locations; Clone ID: 700554311H1
agacnttattcccactgtcatctcnctntttaaacaattgcganncnattgggannatacctagacctttgtactctgagtatnctcatcaattgtttctgncatcaggctcacatacactncttgctttttctgtattcgccaacatcctcaagaggggttttcattccaaatgcaattacccttcaacacactcatnaaaggcctctgttttcgtggggcgattaaaaaagcactttacnntcacgatcanttggtnggctcaagggttccagttgg

SEQ ID NO: 800 - DNA, 277 bp, Glycine max
  unsure (1)..(277): unsure at all n locations; Clone ID: 700554312H1
aaaanaaaagaacgcaaagggtaggcattgacccctttgcaccaaaggaaaannggngnggngnngtgttaaaaaaatattnaacttggttggttcnaagtagnaacaaaaattgtgcattntcccanttctgcatttttngttngncngaggagnaaccaagaattaagaaatgggttgctccgtaanantttgttgtgtctatttttggtgttgttngtggcatgtgttacaggggaggaccctatagnntctacactggaatgtcactatggag

SEQ ID NO: 801 - DNA, 292 bp, Glycine max
  unsure (1)..(292): unsure at all n locations; Clone ID: 700554313H1
acgaatcgancgactacattcccatccctcagacgccagaccgacctcccattcctcctcgccgtcgaaganttttctccatcaccggccgtgggaccgtcgccaccggccgcgtagagcgtggcaccgtcaaagtaggggaaactgttgaccttgtaggattgagagagacaagaaacacaacggttcacaggtgtggaaatgttccagaagattctagacgaagccctcgccggggacaacgtggngctgttgctgagnggggttcaaaagacggacatccagagaggga

SEQ ID NO: 802 - DNA, 284 bp, Glycine max
  unsure (1)..(284): unsure at all n locations; Clone ID: 700554314H1
ttaattcacttgcccgcaaatccttngtcaatgccgacggtattatagagaaaacattcttgtggggtaggtactctttggaaatgtctgctgttatttacaaggattgggttttcaccgatcaagcattgcctaatgatcttgtcaagagaggagttgctgttaaggatccatctgctccccatggagttcgacttttgatcgaggactatcctatgctctgatgggctagagatatgggatgctatcaagtctgggtggagaatatgtctcatctactacaa

SEQ ID NO: 803 - DNA, 291 bp, Glycine max
  unsure (1)..(291): unsure at all n locations; Clone ID: 700554315H1
cttctcattcctttctcttcttcaaatcanggnnctcagctatganttgnnannnananccatcacaagatgaaggtaaaanttggattgggttcatcagaccctgaactcagggaaaggaaagagcaagatgtcaaagaacataactcatggttatcatttggtgnaaggnaaatcatatcatgacatggaggattacgttgtggctcaatttaagcaaatngataacaatgaattnggtttgtttgcnatatcgccggccagcgggtcanaacgtacctnattactncg

SEQ ID NO: 804 - DNA, 295 bp, Glycine max
  Clone ID: 700554316H1
cacattcacctgagctttttgtgaggattccaaagcatggcttcccttgcagcatccactgctgctgcttcccttggcatgtacagaaatgcttggaaaccccatcaacctcagtggtgccacaaggccagctccatctgcctctagccctgcctccttcaagactgtggctcttttctccaaaaagaaggctgcacctaccaaaaaaagctgcagctgctgctcctgccaatgatgagctgccaagtggtatggtcctggacagaaggatcttcttgcctgagggtctcttgga

SEQ ID NO: 805 - DNA, 293 bp, Glycine max
  unsure (1)..(293): unsure at all n locations; Clone ID: 700554317H1
caaaggntaganacagggtgttgtacctaagcactttccaanactanaatgttaaaactttgtagcangtacaaatgacacaatcaatcatttcaatanaaaatccncagtnntctnttaancaaaggtggagttatatttcaatttacctctcatgccaattgcagtgttcaattacccatctggccaagactcagtgatccaagtaagtagccaagactatgcanttgcaacactgatgcatacagtgcaaaattctcanacgggccacacgtcatcatctcaaccatcag

SEQ ID NO: 806 - DNA, 290 bp, Glycine max
  unsure (1)..(290): unsure at all n locations; Clone ID: 700554319H1
actccacggcgcagatccgcngagtttgggaaaccctaattcattcctcttnncttctntcctncaattaccctaacacnagtgatgncangtttggactccannaaggatcgcagtttgntgctcngcaatatgactctaagatgaatgaattgctttccgctgatggacaagaatttttcacagcatatgctgaagtctatgatagttttnntgcaatgggcctcaagaaaatcttctcagaggccnatatgcttatggttttgagaggcctctgccatncagcaaag

SEQ ID NO: 807 - DNA, 283 bp, Glycine max
  unsure (1)..(283): unsure at all n locations; Clone ID: 700554321H1
gatatagaaganaccacaaaggaaggtgaaaaagaagataaagnaaaggatgatgggaaggaantgaaagngaagaagacnaaagaagacaaagacaagaaggagaagaagaaagttactggaaaggacaagaccaaggatcttagtgcgctgaagcagaagcttgaaaanattaacggaaaaatacaaccactcctgaaaagaaggctgatatagaaaggcgataaaagaagctgaagctgagggtctgtatcatgggaaggacaaggatgaggtacntagc

SEQ ID NO: 808 - DNA, 285 bp, Glycine max
  unsure (1)..(285): unsure at all n locations; Clone ID: 700554323H1
aaatttaaaaccccctccggagcgaattctccggcggctggttccgaaagccacggcggctcccggggccaagaagacaganaagccgcacgagagagtccagcgantccacagcgtggaggagttcgagtcggcgctcgaatccgccaaagacaggcttgtggtggtggaatacgctgccagcgacagcgaggngagcagccagatataccctttcatggtggagctgagccgcagctgcaacgactgganttcatcctggtgatgggcganagtcggagaaga

SEQ ID NO: 809 - DNA, 286 bp, Glycine max
  unsure (1)..(286): unsure at all n locations; Clone ID: 700554324H1
gttcgacttgtcctggaaggtgtcgataagttcagcaatttaattgggtcggtgnattntccngatggtgaatcagcannggacctancattggancttgtaganaacggttatgcaaaatacgttnnctggagtgcnaatntgntggnngaagaggcnaagcgttagctgntagactgcggagtntcnggctaagaangacaggttaaggntgtggncnanctatgtaccaccgccttcaaattcaaaggcattcanaaccanaattttctggcaaggtggttnc

SEQ ID NO: 810 - DNA, 285 bp, Glycine max
  Clone ID: 700554325H1
agaaatctcaaaactctacaaacaaaggcaccaataagctttcttctgttggtgttgtggaggaattatttgaagagggttctgcaatgcttacagagaggttaggcaaggattttccatctaatacgaatcctgagattttccgctgtgcggtttgccaagcagatcagccctctgtggacagtttatcaatgaacactgggcctttttccccccagtatctaagccatgggaaggtccatccttctggcacaaactgtcagaagaagaaagatgccatggaag

SEQ ID NO: 811 - DNA, 288 bp, Glycine max
  unsure (1)..(288): unsure at all n locations; Clone ID: 700554327H1
ggatgaacagangaagaagaagnaaagggttttgtgtgtgtcgaagtggatagttccttccttcaattaatctncgattccgaaaccgaatggggattctgtacncgctggttggtcgtggatcggtggtgctggcggagttcagcggcaccaccaccaacgccagcgcaatcgcgcgtcagatccttgaaaaaatccccggcaacaacgacacgcacgtttctactctcaggatcgctnacatcttccatgttaaacgcaccgntggaatacaccgttctctgcatg

SEQ ID NO: 812 - DNA, 284 bp, Glycine max
  unsure (1)..(284): unsure at all n locations; Clone ID: 700554328H1
tctctttctctttctcactctcctctgatatttctatattttgnngctctgtgtctctacgatctggatccaacggtccaaaatgttcggggcttgtgctgcttgtnttcccaggttttagagctccaaaccttcagatccacctcattcgtctccagatcttccttccttgataacgttttcgggntcgagaaggcacttgnttgtttgtcgtacgaaatggagactaaaccgngttcggtgatggttacgctcattacggcgcgttgacgtgcgccgcggaa

SEQ ID NO: 813 - DNA, 284 bp, Glycine max
  unsure (1)..(284): unsure at all n locations; Clone ID: 700554329H1
ataagtaatgtagtatagtctgaattatatcatatgtatttcngtaaacttaatagtatgacaacgcattcatttcctatgcattgattcgatttctgatactatcggagtgaaaaaagtagatctaaagaaaaacgcgggttggattatattagtaacaagtaaattctttgtacgtaaaaagttccaagattttgttggacagaataacaattgcaaagtttgagatcacccagaaagcatatcattttaaaagcctactcgggtattgagcgtttatcaaa

SEQ ID NO: 814 - DNA, 292 bp, Glycine max
  unsure (1)..(292): unsure at all n locations; Clone ID: 700554330H1
gcggctcttgcttctacaaggatcccttcaaacacaaggttcccattccanggcctctacacttctttcccaacccaatgcgccttaaagagacttgaggtgacagaattctctgggcttagatccacttcatgtgtcacatatgctaacagtgctagagaatcttccttttttgatcttgtagcttcccaactcactcccaacaccaatggatcaactcctgtgaggggagagacagtggccaagttgaaggtggcaatcaatggtttcggacgcattggtagaaattccc

SEQ ID NO: 815 - DNA, 293 bp, Glycine max
  unsure (1)..(293): unsure at all n locations; Clone ID: 700554332H1
tnaggnagganaaatggngttgttcttctacgcggtgttcggcggtttnggancggttngccgnagtgacggagctgagcaagagcaacaagganccgaatcaacacctcttccgcattcaattccttcaagaacaanntacctcatcgtactattccctacatgatggctggagattggctacaaggtccatatgtctactaccttncacagtacatatggatatgggaagggagacataggacaactcttcatgctggttttgggtctccatgctcttgnaacaattgtcg

SEQ ID NO: 816 - DNA, 296 bp, Glycine max
  unsure (1)..(296): unsure at all n locations; Clone ID: 700554333H1
gtggtactaacatangccttcgccaggtaacagcgaaggcagtgtatggagccattgccaagtataaagtgactcatttttgtgcagcaccagtggttcttaacacactagctncagtgccccanctgaggacaccattcttacctctaccccatgttgtgcatgtgaatacagctggggctgcaccttcctccttctgttctttccggcatgtctgaacgtggatttcgtgtcacacacacttatggtctctcagaaacctaggcccctctgtctactgtgcctggnnaaccaga

SEQ ID NO: 817 - DNA, 289 bp, Glycine max
  unsure (1)..(289): unsure at all n locations; Clone ID: 700554334H1
acgatacgtaataagttctatcattgaggaagtttcctgtgcatcgtctccgaaaatgaacgacgcagatgtctcaaagcaaatccagcagatggtgcagttcatccgccaggaagctgaggaaaaggccaacgagatctctgtctccgccgaagaggaattcaatatcgagaagctgcagttggtacgaagccgacaagaagaagatcagggcaagaatacgaacgcaaagagcgccaagttgaaattcgcagaagntgagtactcgatgcagctaangcntctcgga

SEQ ID NO: 818 - DNA, 274 bp, Glycine max
  unsure (1)..(274): unsure at all n locations; Clone ID: 700554338H1
tgccaaagctgttgaagcggaaaaggtcagttatgacaatgacatggatggtagcnatggaaggaggaacttgatgttcnnnnnnnnnnnnnnnnnnnnnntttgctctgttgctgggatggcagtggcagatgagccaaaaccaggaaccccagcagccaagaaaaagtatgctaccgatttgtgtcaccatgccaactgctaggatttgtcgcaattgagggactcggtttnnatttacntctgatgatcggaaatgtgcattagggttgta

SEQ ID NO: 819 - DNA, 284 bp, Glycine max
  unsure (1)..(284): unsure at all n locations; Clone ID: 700554340H1
aatagaataaaaaaattatgaaaagatctttggttctgtatagtctttttatactatatttaaagagttacttgtaacgtaatacaaataaactcgagtatggatattgtcaggaagactatttgactttgtttnttcaaccccccaataaattcgaatattatggttatgacactgtttttttcagatttcatttttctataatagagagttctattatagaaatntcgattgtaaaatacaataaaattggattcgatactaaacataaaatagatatctat

SEQ ID NO: 820 - DNA, 285 bp, Glycine max
  unsure (1)..(285): unsure at all n locations; Clone ID: 700554342H1
ctacaacctcaggaggagaatgttcctctgaatccgaagcccgtgctctacccagcgactttgccaganggggatatctggtgtaactgaaggtgtcccaatctcattttggagaacagtactatttgtgtgccactttctggattgattaaccatcttaggtagcagagtccaccatttcttgatttttggaggttaacagtgttcatattcaacactttgctatttctcaacttacaagtgcaagagcaacaaagagcataaaatccttagagtgtcagcagt

SEQ ID NO: 821 - DNA, 281 bp, Glycine max
  unsure (1)..(281): unsure at all n locations; Clone ID: 700554343H1
ggagttttcactgagatcgtgccctcctagcttggctttncaagggatgcggtgntcaactattngtgatcagagatttctgnnactgggttttgactnggatanaaatgaaatgngcattttgtngcttgcnaagcttgcaaagccattgattggaacggctcgaatagtgattaacagtcttcatatcaagggtgatctnctgcctacacctattctagaggcagaagcacttctgtattcttntgtatcaantcctgaagtgagaataggaatgcctt

SEQ ID NO: 822 - DNA, 283 bp, Glycine max
  Clone ID: 700554344H1
ggcactgctttctttaagtgccatggacatgagcaatttgagatgacgggtttggatcctgagtataataggttgttcaatgagggcatggtgtgcactgctagggttgtgtccaaggctgtgatcactggctacaaagatgggttcaaccagattaagtccttggttgatgttggaggtggcattggagggtctctttcggagattgttagggctatcctcatatcaatgccatcaactttgacttgcctcatgtggttgccactgctcctaagttcgatgg

SEQ ID NO: 823 - DNA, 287 bp, Glycine max
  unsure (1)..(287): unsure at all n locations; Clone ID: 700554346H1
gtgagagaganatggagaatgcggaggagatgatgcagcaaaacgacgaggttttgtcggttgaattccagctccttccggttggaataaactgtttttccctaagaaactgggaacaccaagaaaaagtgagattgtattcattgctccaactggagaggagatcagtaccaaaaaacaattggagcagtacctaaaggcacatcctggncaatcctgtacatttcagagtttgactggggaactggtgagacccctaggcgatcagcaaggatcagtgagaaggt

SEQ ID NO: 824 - DNA, 288 bp, Glycine max
  unsure (1)..(288): unsure at all n locations; Clone ID: 700554348H1
atccctctttcttcctcttcctcagtagtgcgattttcgattctcttctctgcaactatgcctaaccctaaggtcttcttcgacatgaccatcggcggtcaacctgccggccgcatcgtgatggagctctacgccgacgtgactccgagcaccgccgagaactnccgcgcgctactgcaccggcgagaagggcgccgggcggagggcaagcccctccactacaaagcttcgtccttccaccgcgtgatcccgaatttcatgtgccanggcgncgatttaacgncggga

SEQ ID NO: 825 - DNA, 287 bp, Glycine max
  unsure (1)..(287): unsure at all n locations; Clone ID: 700554349H1
gtggtactaacatangccttcgccaggtaacagcgaaggcagtgtatggagccattgccaagtataaagtgactcatttttgtgcagcaccagtggttcttaacacactaattaangccccagctgaggacaccattcttcctctaccccatgttgtgcatgtgaatacagctggggctgcacctcctccttctgttctttccggcatgtctgaacgtggatttcgtgtcacacacacttatggtctctcagaaacctatggcccctctgtctactgtgcctggaaa

SEQ ID NO: 826 - DNA, 282 bp, Glycine max
  unsure (1)..(282): unsure at all n locations; Clone ID: 700554350H1
acgatacgtaataagttctatcattgaggaagtttcctgtgcatcgtctccgaaaatgaacgacgcagatgtctcaaagcaaatccagcagatggtgcagttcatccgccaggaanctgaggaaaaggccaacgagatctctgtctccgccgaagaggaattcaatatcgagaagctgcagttggtcgaagccgacaagaagaagatcaggcaagaatacgaagcncagagcgccaagttgaattcgcaagaagatgagtactcgtgcnctaaatgcttctt

SEQ ID NO: 827 - DNA, 283 bp, Glycine max
  unsure (1)..(283): unsure at all n locations; Clone ID: 700554351H1
gnagaacggagngcacgcanatacttctcagctgngagtgagaatttggagagtannnnnngacgcagctgantgnggacatgtcagtgcaannttacctggataagcanatgcnntcccgaaaacncgaagatgccgtacnatgcngcngttagggccnaaacctccgatcccgnncgttcattctcgaatacacatgcganacgcantgcaattcggtgataaaacaatcaaggcgaggcagatcctagttagcagnggaatccancgtcgaatcgattgc

SEQ ID NO: 828 - DNA, 272 bp, Glycine max
  unsure (1)..(272): unsure at all n locations; Clone ID: 700554354H1
tgccaaagctgttgaagcggaaaaggtcagttatgacaatgacatggatggtagcaatggaaggaggaacttgatgttcnnnnnnnnnnnnnnnnnnnnnntttgctctgttgctgggatggcagtggcagatgagccaaaaccaggaaccccagcagccaagaaaaagtatgctccgatttgtgtcaccatgccaactgctaggatttgtcgcaattgagggactcggttttccttttacttctgatgatcggaaatgtgcattagggttg

SEQ ID NO: 829 - DNA, 278 bp, Glycine max
  unsure (1)..(278): unsure at all n locations; Clone ID: 700554356H1
aatagaataaaaaaattatgaaaagatctttggttctgtatagtctttttatactatatttaaagagttacttgtaacgtaatacaaataaactcgagtatggatattgtcaggaagactattngactttgttttttcaaccccccaataaattcgaatattatggttatgacactgtttttttcagatttcatttttctataatagagagttctattatagaaattcgatgtaaaatacaataaaattggatcgatactaaacataaaatagatatc

SEQ ID NO: 830 - DNA, 97 bp, Glycine max
  unsure (1)..(97): unsure at all n locations; Clone ID: 700554357H1
cacacactctcttcaatttcnagggttttgcnattgcnttgcctccgttccccctttctcacaaaancaacgcntttnctctnctccntcgtatcta

SEQ ID NO: 831 - DNA, 270 bp, Glycine max
  unsure (1)..(270): unsure at all n locations; Clone ID: 700554358H1
ctggtcgccttcgccacggggcttctggtttccggctccaccatcgtcgtgcnctccaagttcgagatgcacgacatgctctcctcgatcgagaggttccgcgccacttacctccngctcgtgccgcccattctggtggccatgctcaacaacgccgccgctatcaagggcaagtacgatatcacgtcgctgcattcggtgctctccggtggggctccgttgagcaaggaggtcatagagggcttgtggccaatatcccaagtcaccatc

SEQ ID NO: 832 - DNA, 283 bp, Glycine max
  unsure (1)..(283): unsure at all n locations; Clone ID: 700554359H1
acgatacgtaataagttctatcattgaggaagtttcctgtgcatcgtctccgaaaatgaacgacgcagatgtctcaaagcaaatccagcagatggtgcagttcatccgccaggnagctgaggaaaaggccaacgagatctctgtctccgccgaagaggaattcaatatncgagaagctgcagttggtcgaagccgacaagaagaagattcagggcaagaatacgaacgcaaagagcgccaattgaantcgcaagaagattgagttatacgatgcagctaatgc

SEQ ID NO: 833 - DNA, 283 bp, Glycine max
  Clone ID: 700554360H1
ggcaggagcagcatcaatacgagctttcgatcaggaaggccgtttcatatacacaaatcttctccttgtgggatggctctcaaggccatggtttcataatgtgtctgcaatggaatggctttctttcagattgaatttactttcaaattttgtttttgccttctcactagtcatgctagtgagcctccctgaaggaataatacaataccaagtattgctgggttggcagtaacatatgggatcaatctgaagtgttgcaagcttcagttatatggaacatatg

SEQ ID NO: 834 - DNA, 283 bp, Glycine max
  unsure (1)..(283): unsure at all n locations; Clone ID: 700554361H1
aatttacagtacttattaacttcctcacaaatngggatcccctgctgcttcttcaactttaganccatgtttctnttgacttngaaangcgtccaaatggtgtgcaatttaatggagtttcacttgctaanaaagctttntctacctcnaaacaagaatcctcantagttgaagactgaaatcaattaaagctgatgatgattcaattccttttggtctggcctctactancttngctgatccttcaattggaagaaataaaactgtgaggtcaacacggctt

SEQ ID NO: 835 - DNA, 281 bp, Glycine max
  unsure (1)..(281): unsure at all n locations; Clone ID: 700554362H1
ttggaggctacatctttgtttncaacaatnataccatggcngagaatcttcaagngacaaatctntggtctgcctgccacgatacanngattctgttcgggccattactccggggttgncccttntcctttncaactattccactnaccaagtccatggantctttgaggctgcaagttttggagggtcaaatattgatccancngcttgggaggataagnagtgcccggtgaatctcgtttccccgctcagtacgagtgataataggnaaattgtgaacc

SEQ ID NO: 836 - DNA, 284 bp, Glycine max
  unsure (1)..(284): unsure at all n locations; Clone ID: 700554363H1
cattttctctctctaaatttttctttctcattttctctctctttcttatctcngaaaatctttactgagctttcaaacgaactttnnaattctccagaaccttctcgtttttccgccgaggatcgcgattccgcagaatcgttctcaatcgtcgcttgattcggttcgattccgtggttcgagctgcatgaactggttcgggaagctggattcatcatcgtcgcaacttgaacttcaatcattcgttacgtgtctgttgatttttttcctccattttcgcctca

SEQ ID NO: 837 - DNA, 108 bp, Glycine max
  unsure (1)..(108): unsure at all n locations; Clone ID: 700554365H1
attattctatatgtttttcgaaacccaaaagtgantagatatttgccattatggttgtactgattttgcatttgtcctcggctataattccacacaacatannntnnt

SEQ ID NO: 838 - DNA, 286 bp, Glycine max
  unsure (1)..(286): unsure at all n locations; Clone ID: 700554367H1
cnannctgnnagcncgcgccagagcttgtgancgctggcgctnaggattccgagaantacgcatgtcanncnatgtacacggagnttcnccacnttgccatggctgangcaaacgccagttgttgcnnatccgttttgaaacggnnagcgtngccgtnccggccannggaagccgcnttcngaaagggatnactccgccgtcgaggcagaaaaaggaagaagaggatgtttgcttcanatacttcgacggtggaanccttgttctctgtgatcgncgtggatnncc

SEQ ID NO: 839 - DNA, 256 bp, Glycine max
  unsure (1)..(256): unsure at all n locations; Clone ID: 700554369H1
tntccaacaaggcaacaacaaannncngggttgatgcaanntttgttcaccataataatgtcanggaganggaggaggaagttgaaattgttgagtgataacaattactgacagcagaagagctgcantggaggtggtaaatgaaaatttggagctgcaaacttggttctgatatccctactgaactacttagaattantctgtcccttnaagtctagcatgatatgttcgggctcggttgtttncnananatagc

SEQ ID NO: 840 - DNA, 275 bp, Glycine max
  unsure (1)..(275): unsure at all n locations; Clone ID: 700554370H1
ccctcgctctatttctcantctctgtgtttgcggctgaggattccgaacgantgaccttcttcgtttctacgcaaagtttaagtaatcatgggtaangaaaaggttcacatcaacattgtcgtcattggacatgtcgactctgggaagtccaactaccactggtcacttgatctacaagcttggaggtattgacaagcgtgtgattgagaggttcgagaaggaggcgccgagatgaacaagagtcntccagtagcctgggtgctcnacaanctcc

SEQ ID NO: 841 - DNA, 276 bp, Glycine max
  Clone ID: 700554371H1
cggcgatattcaacgaatttttctcgctcctcaagattcttctgtccaagtgtctgccaagaggtcacgtggatcccgagaccaagcatattcagaaggatgggttgaattcggtaataaaagtgttgctaagagggttgccaatatgttaaatggtgaacaaatagggggtaagaagaggtcatcattctactatgatcttggaatattaagtacttaagtaagttcaagtgggatgatctgactgaagaatagcctaaagaaagctattcggga

SEQ ID NO: 842 - DNA, 279 bp, Glycine max
  unsure (1)..(279): unsure at all n locations; Clone ID: 700554372H1
ctagtttcttacaagcctctactatactgcttcaccttctgctctagaaaattcagtgctgaaacatggcttcggctactctctctgtagccaaaccagcccttcaggcaaatgggaaaggcttctctgaattctctggcctccgaagctcatcaggcttccttcccttttctagaaaatcttcagaggatttccattctgtccattgcctccagacctatgcagttggnagcagtggaggatacaagaagggtgtgacagaagcaaaactgaaggttg

SEQ ID NO: 843 - DNA, 283 bp, Glycine max
  Clone ID: 700554373H1
ccacaaattcacacattttttgttgcattatcacaaacacctcgtccctcacaatgcagctagcaatggcggccaacgctgtcgtttcaccgtcgccgttccgacctcagccctttctccggtcatccttctccggcgtctccgtcaagctcactccccaatccataacgctttcacgctccaagtccctcaccgtcttcgccgccaccaagaaggccgtcgccgtacctcaaggggacctccgccgtcgaaggcgtcgccactctcatccaagaagacgatg

SEQ ID NO: 844 - DNA, 278 bp, Glycine max
  Clone ID: 700554374H1
attggaggctacatctttgtttgcaacaatgataccatggctgagaatctcaagagacaactctttggtctgcctccacgatacagagattctgttcgggccattactccggggttgccccttttcctttacaactattccactacaccaactccatggaatctttgaggctgcaagttttggagggtcaaatattgatccatcagcttgggaggataagaagtgccctggtgaatctcgtttccccgctcaggtacgagtgataataggaaaactgt

SEQ ID NO: 845 - DNA, 281 bp, Glycine max
  unsure (1)..(281): unsure at all n locations; Clone ID: 700554375H1
gtttggttgactcccttttccaagctccacaggatgctggaactcactatgcagtcatgagctcctacgagtacctacagcactggacttcgccagtacttggacaacaaaatggatggattctacattgctccagcttttatggacaagcttgttgttcacatctccaagaacttacatgaccctgcccaacatncaaggttcctctcattcttggtatctggggaggcaagggacaaggaaaatctttccaatgtgagcttgtcttgccaagatgggaa

SEQ ID NO: 846 - DNA, 268 bp, Glycine max
  Clone ID: 700554377H1
aaattgaggaagtcgattaagcagaccaattgtcatgggttgttcttgattttgcgaagacccttttgaagtttagataataacctgtcttgtcattatgttttggatttggattttacttttctcgtttttttaatgtacttttccccgtttcaacttaacaatgatataagttgcatatggtctattgattgtttcgtctccatatttgcttaatgctatgaagtgggttgctctcccatttttgagagttgaacatctctgctag

SEQ ID NO: 847 - DNA, 280 bp, Glycine max
  unsure (1)..(280): unsure at all n locations; Clone ID: 700554379H1
gatatattcgagactctgcttttgaaccacgccgttgggttgctccaggacagcgttctataacaccttgtttnttgtgattgtgggttggaaacccttnaagtgcctttagatgcaaaattccatactgaagatccaanagttgtggttgggaagttttgcgacagaggtacactgcnggatgtgttctaagactattgctgactgtgttgaagctctgataggngcatactatgtagatggtggacttttgctcactaatgtgatgaaatggcttggg

SEQ ID NO: 848 - DNA, 280 bp, Glycine max
  unsure (1)..(280): unsure at all n locations; Clone ID: 700554380H1
catggcttcggctactctctctgtagccaaaccagcccttcaggcaaatgggaaaggcttctctgaattctctggcctccgaagctcatcaggcttccnncccttttctagaaaatcttcagaggatttccattctgtcattgccttccagacctatgcagttggaagcagtggaggatacaagaagggtgtgacagaagcaaaactgaaggttgccataaacgggtttggaaggattggaaggaattcttgaggtgctggcaggtcgcaaagatcccct

SEQ ID NO: 849 - DNA, 271 bp, Glycine max
  unsure (1)..(271): unsure at all n locations; Clone ID: 700554382H1
ttttgatagtttgagaacagaattcagcagtgaaattggaacttttggccaaaantgatcatccgaaacctggtgaagctactaggttatnttgacaaaggaaatgaacgccttcttattacagagtttgtgccaaatggtacccttagagaacatttggatggtatgcgtggaaaaatcctagacttcaatcaacgcctacgaaattgcaattgatgttgctcatggctgacctatctgcatctgtatgcagaaaagcaattatccatcg

SEQ ID NO: 850 - DNA, 278 bp, Glycine max
  unsure (1)..(278): unsure at all n locations; Clone ID: 700554383H1
gtctgatgggaagcacactgtcacaagtcccttggttgtgacaatgcagcagcctctggattagagtttgaggttttgggtgtagaaantttgggtttttatccatcatggatatcntataanaaagttagctctatatgcttaatagagaatgtgtttnncnaaggngttctgtttgtaagaactggtggaaggatggtttgttagaaagagcgtgatgccgctnctgcccaaaagggggaaaagttattatcatagtccaaggttggtggaagctg

SEQ ID NO: 851 - DNA, 285 bp, Glycine max
  unsure (1)..(285): unsure at all n locations; Clone ID: 700554384H1
aatcttatcttagcaatagctacccctattcacaagcaatactctattaggcaaaaacaccaaatgggagaggnaaaagagcagcctaagaatgaaaccgagaagaagcccgaggnggccgccgcagcccccaagaaagacgacggacccatccctgtcgtttacaaactacgacttngcattgcgagggatgcgtacaagaagatcaaacgcacatgttcgccacttaccaaggtgtggaaaccgttaaggcagatctatcgtcgaacaaagtgactgttnccg

SEQ ID NO: 852 - DNA, 253 bp, Glycine max
  unsure (1)..(253): unsure at all n locations; Clone ID: 700554385H1
gacctctctccactctttttcagagacanatttcccttattntctcccatnaanaaaaattaacncaaccccacttnacactnaccaaacaancccgctancncagatcaaccttctttcagacatagcgaagaaacanaacacngttcatcatgtacaagtnnccagcaccatgtatttacgcantctccttcacnatnctnganaaagaaaaagnagananggcnctgccntncgncntcttcatntnnaa

SEQ ID NO: 853 - DNA, 271 bp, Glycine max
  unsure (1)..(271): unsure at all n locations; Clone ID: 700554386H1
gccactcaggcttccattgcaggatgtctacaaaattggtggtattggtaccgtgccagtgggacgtgttgagactggtgtcgtgaagcccggtatggtggtgacttttggtcccactgggctgacaactgaggttaagtctgttgagatgcaccatgaggctctcacagaggctctccaggtgacaatgttggcttaatgtgaagaatgttgcagtcaaggatctcaagcgtggttttgntgcatccaactccaaggatgaccctgccaa

SEQ ID NO: 854 - DNA, 273 bp, Glycine max
  unsure (1)..(273): unsure at all n locations; Clone ID: 700554387H1
ctccatttgancttcttcaggtaatagaagttgtgaagaaggaaaacgtggcagacgatgaggatagtgatgtanaaaaaacaagtgataacatgaaaaaaganaatgatgaggaaatgatcgatgctatgggaaaacatggggaagaaaaggaggcaaaagacgaagacatgcaggaagtagaaccaagtgataacatgaaaaaaggcatgaggaaatgaccatgataccggaagactagggaagaaaaggngggaaaggaccaagactgcc

SEQ ID NO: 855 - DNA, 276 bp, Glycine max
  unsure (1)..(276): unsure at all n locations; Clone ID: 700554388H1
gttttcggtctctcccagttgttgggaggactcagatgtgtgtttgttctccgttgaggcactgtgtcccgntgggagagcaaggttattggtggggtttgagaaatttgagctatggcagggtgaaccttgtgataacgggagggaagaccaantttgagactcatgaggaagagcttccgaagaaggacnagtggacgacaaagaagaggttgaagatgcagaggaagagagagaaggagaagaggagagcggccaacaggaagtccccctnca

SEQ ID NO: 856 - DNA, 279 bp, Glycine max
  Clone ID: 700554389H1
ctcataacacaaagcacaaagcaaagctcatccttgagttaaaaaatggcagcagcttcttccatggctctctcatccccatccttggctggcaaggccgtgaagctgggcccatcagccccagaagtgggaagggtgagcatgaggaagaccgtcaccaagcaggtctcctcaggaagcccatggtacggcccagaccgagtcaagtacttgggcccattctctggcgagcccccgtcctaacctaaccggtgagttcccaggcgactacggctggga

SEQ ID NO: 857 - DNA, 277 bp, Glycine max
  unsure (1)..(277): unsure at all n locations; Clone ID: 700554390H1
acgccatgcctctttttggaattttccagataccctcatttatggacataatcactgacctcgccatgttcattactccgctatggattgcggttatcntcggcgtcgtcgtgggctgggcgtggaagcccaaatgggcctttcaccccaaagacgctcttctcaagtttcgctctcctcgccctcccaatccccaaaacgacaccgcttttacctactaccgccaccagttcctccgcgcgtgagaaagacgcgagtgggagtcctgtggtgacgg

SEQ ID NO: 858 - DNA, 257 bp, Glycine max
  unsure (1)..(257): unsure at all n locations; Clone ID: 700554392H1
cccctccctcacannctttctagggtttcacntcgcgantgcnttctgcgccgaggttgccttgatatggattctacaagtcaggcataccaacatcgcccccttaccatcaaattatggcctcctagccagagtactaggcnaatgcttgtagagcggatgaccaagaaccttacaactccgtacaattttctctagaaagtatggccttcntagcaaggnagaggctgaggaggatgcgaaacacattgaggatg

SEQ ID NO: 859 - DNA, 279 bp, Glycine max
  unsure (1)..(279): unsure at all n locations; Clone ID: 700554393H1
gctgctttttctcgtgtatctgctagagctgttanaggcacttgagcaatttggaaatgtcgaatttattgcggcattctttgagcaaattcactttcagtccaaacggaacaccaactgggagagaaaaagtaacaccaaaacataagcatctgagaccatttcaatgtgtgctgacacaggataacagaagcattgccgtccaagaatggcaatgattcattggtcatatgtcgggttgtgaatgggatgtggcagacgagtggtgggtggggcaga

SEQ ID NO: 860 - DNA, 279 bp, Glycine max
  Clone ID: 700554394H1
gggcagtagccgagattccgtgagttgcaaaaatgaagacgattctttccaccgagaccatgaacatcccggacggcgtgagcatcaaagttcatgccaaggtcatcgaagttgagggcccccgcggaaaattggtgcgagacttcaagcatttgaatctcgattttcagctcattactgacgaaaacggtaaaagaaagctgaaaatcgacgcgtggtttggttctcggaaaacatccgccgccattcgcaccgccttgagccacgtggagaatctta

SEQ ID NO: 861 - DNA, 279 bp, Glycine max
  unsure (1)..(279): unsure at all n locations; Clone ID: 700554395H1
gtgaaagaggaatcacaattgatattgccttgtggaagtttganaccaccangtactattgcacagtcattgatgcccctggacacagggatttcatcaagaacatgatcactgggacatcccaagctgactgtgctgttcttatcattgattccactactggtggttttgaagctggaatttcaaaggatggacagactcgtgaacatgctctgctttcattcacccttggtgtgaaacagatgattgttgctgtaacangatggatgctactacacc

SEQ ID NO: 862 - DNA, 281 bp, Glycine max
  unsure (1)..(281): unsure at all n locations; Clone ID: 700554396H1
anataataatcacttggaaacaaccgcgctaaggttggaacttggaggaacttgtgtctntgtgtccttttttccagagtcatggctatggctttgagtctctcccaattccctgttcgtgggtctncttctttgcccaaaagaagactacccagaagaagcttttgcattaggggcatgtcagaaacctcttccacttcttctgtgagcacccaacaagaacaaccaattctgataatgcttcttcagtgacaattgctcctccccctaacttcaagccc

SEQ ID NO: 863 - DNA, 284 bp, Glycine max
  unsure (1)..(284): unsure at all n locations; Clone ID: 700554401H1
ggtgagggccttccatggcttccgcttgtgcttcctctgcaattacagctgttgccatctctacgccgagttccgggcagaagaatggatcaggaggttgttttcttagtggaaggaaattgagggtgaaaaaggagagagcagcaattggggacgatcgatgggcacgacagtgtgcgcagttgctgagcctgacagacctctanggttcccaggcagcacccctcctccatggcggatggcatctacctggagattcggctttgaccctcttggtcttggat

SEQ ID NO: 864 - DNA, 278 bp, Glycine max
  unsure (1)..(278): unsure at all n locations; Clone ID: 700554402H1
ataactagaaacagtgtgatgaaaatgaaggtccttgttttcttcgttgctacaattttggtagcatggcaatgccatgcgtacgatatgttccctctccgaatgaacactggctatggtgcccgtactccggaggtgaaatgccaagttggaggcntgctgtggaagcacannacatctttggctttganaccattccngaanagtgcgttgaagcaacnaaggnatacatccanngcggacnatataggtcggattcnaaaccgttaancaacnag

SEQ ID NO: 865 - DNA, 284 bp, Glycine max
  unsure (1)..(284): unsure at all n locations; Clone ID: 700554403H1
ctctctttctttttcttcccatttcacccctcgtctttccttgtttccggtgagggccaaccacaacatatgttaaacaaggaacaacctccaaaacataacatcctacgccaaacaaaactttgacctccttcagatctatacccttcttttctctctcntctantttcnaattctacatcangggnacggnngntctacgggcaaanattgtttnaaccaagnatcgggntntcancgcctggnntttcccggcnaagaaactttngnncccaccaanacna

SEQ ID NO: 866 - DNA, 211 bp, Glycine max
  unsure (1)..(211): unsure at all n locations; Clone ID: 700554404H1
cttcacttgtacactcttcanccactccaacaaagtngntggtttttggttcttannccatggcatccacatcctctctgcatncatctcaggcccttctggcacgtgctgtgtaccttcatggctcntcttcnggacgtgtctcatcnccttccantcatcncngggcttcaaagtncacntcnnccagnnaagnnagaacnnangtctt

SEQ ID NO: 867 - DNA, 285 bp, Glycine max
  unsure (1)..(285): unsure at all n locations; Clone ID: 700554406H1
aaacactcataacacaaagcacaaagcaaagctcatccttgagttaaaaaatggcagcagcttcttccatggctctctcatccccatccttggctggcaaggccgtgaagctgggcccatcnggcccagaagtgggaagggtgagcatgaaggagaccgtcacnaannaggtctcctnagganagcccatggtacggcccagaccgagtcaagtattgggcccattctctggcgagcncccgtctactaaccggtgagttcccaggcgantacggctgggacatg

SEQ ID NO: 868 - DNA, 276 bp, Glycine max
  unsure (1)..(276): unsure at all n locations; Clone ID: 700554407H1
gggaatttcagttataagactctcaggtggtggtgcatcgctgagttgtgtgagagtgaganagagagagtgtgtgtgtgtgcagaagatgtgggccattcagcagaanaggggcttctggtttttcatcatcatccacggcaagcaagtccactgaaggaattgatggaactngtctcactgccattgtcacaggagcatccagtggtattggcactgagactacacgtgtcctttcatgcgtggtgtccatgtgattagggtgtgagaaatagc

SEQ ID NO: 869 - DNA, 224 bp, Glycine max
  unsure (1)..(224): unsure at all n locations; Clone ID: 700554408H1
ggctgacattgttgccaacaaatggaagtgagagccaaacaaattctcattggtaattaaattattatgtatgtaccatgccattgtaattttgtatgctnnnnnnnnnnnnnnnccactacaacacttgttgcttcatttttcttttaaactttactgagaaacagaaccatcaattttctctgccttctcattgtgcaataaaattcttaccttgaaatctg

SEQ ID NO: 870 - DNA, 288 bp, Glycine max
  Clone ID: 700554409H1
caactaactcactcgcgccatggctgctaccatcatcaccacatgcaagctctcactgcttttgagtcttctctcagtttcattttgctgggtgtgaggtctgatacccttcagaatgtaggcgcaattccccccacatgcaagcgcatagaggtcccagctatgatgtcattcacgtaggcaacggctacgaaatccgtcgctataattcacccgtttggatttcaaacagccccattcaggacatttctctcgttgaagccacaagaaccggcttcaggaggttat

SEQ ID NO: 871 - DNA, 285 bp, Glycine max
  unsure (1)..(285): unsure at all n locations; Clone ID: 700554410H1
ttctgggctaaatagaggccttgctgcaagcgaagacgatcttcgaaaggcagatgatgctgctaaggaacttgaagctgctggaggacttgtggatctctcgcttggtccttgacaatttgcaagganagatggaaactcatttatagcagcgattttcgtctcgaacccttggtggaagccgtcctggtcctcccataggaagactcttcctattatcttggacaggtttttcaagaattgacatcttgagcaaagattttgataacatagtggagcttcaat

SEQ ID NO: 872 - DNA, 284 bp, Glycine max
  unsure (1)..(284): unsure at all n locations; Clone ID: 700554411H1
caaggntcctagtctttggttggtatgcacatgtgaatcttctcaaggggactcttgtgggntgncttgccatattgagtgtgccctttcaacatgnaaaagtaggagttgttgatcatggacaactgacgngcactagatggtggttattgtntgcatcctgccgtaaagttactgggatacttggatgttggaagaagcagctaaatatagcaaaagatgcccggcgtgtagatgtactatgctacagaatagtttgagctacaggcttttggaggnattca

SEQ ID NO: 873 - DNA, 232 bp, Glycine max
  unsure (1)..(232): unsure at all n locations; Clone ID: 700554412H1
gtctcaggaggacggagactacgaagaagaagacgacgacgttttggccgacgacgaagaaaacgagccctctccctccacggctcttgccgtcaccgtcgccgtccccggttcctcccgtctccaacggcggtgccgctccaatttcgacgcccaccgccaccaccatcgtcgtcgcagatcctccgatccgaagcggcggcgctcgagccagtcgaggagaaaaanccgc

SEQ ID NO: 874 - DNA, 284 bp, Glycine max
  unsure (1)..(284): unsure at all n locations; Clone ID: 700554413H1
gtggtttctctcttgttggggactttacttcagagcgagattgatcccattgcaaattccagtagactatngacgacttgtnantactgccactttctntgctgggattactccaagcaacgctaggggtttnaaaggttaaggattttngattgntnccnatctcatgctgcaattgtcggntttatggggggagctgncatcacaattgcccttcaacagctcaagggntcctttggattgcaaagttttcaaagaaaactgatgtnatctcngtgagcatc

SEQ ID NO: 875 - DNA, 285 bp, Glycine max
  unsure (1)..(285): unsure at all n locations; Clone ID: 700554414H1
gtctcacttgactcgattgcaagtgatccacgaccacactgttcgcttcacaaaagcttcgaatccattcctcagtaacatctgccnnncngtcttctccttcaccatgccacctaagcctttagactatgggtcaataaatgaaaacgtgagaagagtcaatatgctgtcagaggtgaattataccttcgagcttctgagcttcagaaagagggcaaaaagattatatttactaatgttggcaacccacatgcattgggacagaaaccatgagcttccctcgtc

SEQ ID NO: 876 - DNA, 283 bp, Glycine max
  Clone ID: 700554415H1
ctgcagcattagggtttatcatctgcttcaatggggaagggaacagggagcttcggtaagaggaggaacaagacccacactctctgtgtgaggtgtggccgccgcagcttccacctccagaagagtcgctgcgccgcttgtgctttccccctgcacgcacgcggaaatataactggagcgtcaaggcaattcgcagaaagaccaccggaactggcaggatgagatacttgcgtaacgtgcctcgccgtttcaagagtggcttcagagaaggtaccgaagctgc

SEQ ID NO: 877 - DNA, 285 bp, Glycine max
  unsure (1)..(285): unsure at all n locations; Clone ID: 700554416H1
agctagcaataatgcgtttttgaaacccgtattcatctgtatccaacgatttactagaaggagatcgcaatttctccatcttctcgtttcggtggctcgtgaaatcgaaagttatcgaaactttcgcgcgancacgaagtattgggaaccagcaaaatttctatggctggcgaaccactatatccaatagcagtgcttatagatgagttgaaaaatgatgacatccagctgcggttaaactcaattcgcaggctatcaacaattgcgcgtgctcttggggaggag

SEQ ID NO: 878 - DNA, 278 bp, Glycine max
  unsure (1)..(278): unsure at all n locations; Clone ID: 700554417H1
ctttctcgcaganacgtattgttttnctctctttccgcggcctagatctgagcagtttggaaaccctaactgctctcaccaacgacntcaccactctctccgattcaactacctctttcgtcgccctaagtcatggcaggaattgcacccgnggatcacagtttgatgtcgtcaatatgataccaagatgaatgagctgcttacgtccgatggtcaggnttctcacatcctangtgaggttatgacagttttgagctatgggctgcaagagaatctcc

SEQ ID NO: 879 - DNA, 163 bp, Glycine max
  unsure (1)..(163): unsure at all n locations; Clone ID: 700554418H1
gttntctacttttcttcnacacccactccataaacttactcaatanatatcagtnctgnttcaacacngcacatcatcntctaatgctgtaaaatttgtaccangcagcaaggggctctgnttntncttttgagcgnggtctcncngttccccncatcataag

SEQ ID NO: 880 - DNA, 276 bp, Glycine max
  unsure (1)..(276): unsure at all n locations; Clone ID: 700554419H1
attgacaaaattcaccctacagttatttgccgagcatatgccaaagctttggangatgctattgctgttcttgacaaaattgcaatgctatcaatgctcaggatcgaggtataatgctggggcttgtaaaaagcngcataggtaccaattcncngggccnattgggggattnaatnccggcntngccatnangcnacttccacnatangnggtncagnttggcnanggtttaaaaanggggataatnnaaataannccaagttgngaaggnccagg

SEQ ID NO: 881 - DNA, 284 bp, Glycine max
  unsure (1)..(284): unsure at all n locations; Clone ID: 700554420H1
cnggaattgaatagaaatagaatcgtcgattttctctttctctgactctagggtttcattattttcttctgtagatccatctatctagcttcggagctggcaaatggacgtcgcagtcatgccntccggtcaccggtggntcntcttcggagnacgggtcaaanggntngncttnantccgnttccggttcnntttngggttttcnagaaannacggtnnagttcagnatgtatcnccaaacncaagcanaancaggtcgnagaanagggtttgnagtnanact

SEQ ID NO: 882 - DNA, 272 bp, Glycine max
  unsure (1)..(272): unsure at all n locations; Clone ID: 700554421H1
ctttctctgagtaccccccacttggtcgctttgctgtcagggatatgcgtnnaactgttgctgtgggagtcatcaagaacgtggagaagaaggatcctactggagccagggtcacaaggnngccnagaagaggaagtgatcgtgcggtttggttcatcaggggatgtcgtttcttatggttacaataaatgttggtttcttgcccttgtgtcttcgtttcnaggtagcttgtttttcggacatagtttgaagtctccaccatcatctcgcaa

SEQ ID NO: 883 - DNA, 275 bp, Glycine max
  unsure (1)..(275): unsure at all n locations; Clone ID: 700554422H1
gcacaatagttgtgttgtgttcagttaagggtgaaccttagcaacagcatgancatcactattctgtgtggaacctgttaaatgtgctatagtttattcaattcncccatggnttcttttctttnccttancctcttcccanttaaacttantaaaggcctcttnagcagctaccaccantacancancaacaaccactcttcccacagctgagacatnaatgaggaatttggcagaaaaggcatcaagttcttggagtctgataacactcccat

SEQ ID NO: 884 - DNA, 286 bp, Glycine max
  unsure (1)..(286): unsure at all n locations; Clone ID: 700554424H1
cttactcctcctgcagttgaggcaatatcagagagttttggagagtggattatcaaaggtttaaagaaggaaaaaggataccctgtagagaatgttagancgtctctccgggcgtgaccctcgagtccacagggtcccaaattgagcgtcgcagttttgcaggtctggctcgcgccggttgcatggtgtatgatatgggactagccaccaccccggcttgtttcatgagcatttgttgcctccattgcctatgatgcttcaatgatgatganagcttctcacttgc

SEQ ID NO: 885 - DNA, 284 bp, Glycine max
  Clone ID: 700554425H1
gtggaggaccacttggtgaaggacttgacccaatctaccctggtggtgcttttgaccctcttggtctggctgatgaccctgatgcattcgctgagttgaaggtcaaggaactcaagaacggtcgcttggctatgttctccatgtttggttctttgttcaggctattgtcactggcaagggccctattcagaacctttacgaccacgttgctgatcctgttgccaacaatgcttgggcttatgccactaactttgtccctggacaatgaggatgcctacatgcaa

SEQ ID NO: 886 - DNA, 281 bp, Glycine max
  unsure (1)..(281): unsure at all n locations; Clone ID: 700554426H1
cttctctgcatcctttgggatctcttgcatagaccaaccccagangaagaaggaaaaaaataacnnacaataanaatcaacccttttattttggggcttgttggtgattctgttgtacagaagtgttcgttagttatacatttgttcaagttgttgtatagattgattcattattttaacgtactttggagcattgcatgagtgattgccctctgattcttttgtgaagtcaataaagtccctataattacaaactgagattcagaagcctccggtagggt

SEQ ID NO: 887 - DNA, 283 bp, Glycine max
  unsure (1)..(283): unsure at all n locations; Clone ID: 700554427H1
gcaggaggtggatctacttctacccggtacagcaagactacaaatccagctaggtgtgaacatgcctgctagggcagagcagattcctggaaaagaggaagttcaaatgttccatgaggcttacgatcncgtactttaccttggtataattgacatattgcaagagtacaacatgactaagaagattgaacatgcatacaaatctattcagtttgattcatatctatctcggcggtggacccaacattctactcgcgtcgcttcctggattttattcagaaaa

SEQ ID NO: 888 - DNA, 282 bp, Glycine max
  Clone ID: 700554428H1
ctaaacgactctatctctcttcgttttgttcttccttgcgctcctcctcgttcgttcgttctcccttcgcgtagatcggcaatggcggagaccgagacgtttgctttccaggctgagatcaaccagctcctcagtctcatcatcaacacttctactccaacaaggaaatcttccttcgtgaactcatcagcaacgcctctgatgctttggacaagattagatttgagagtttgacggacaagagcaagctcgatgctcagccagagttgttcattcatatta

SEQ ID NO: 889 - DNA, 280 bp, Glycine max
  Clone ID: 700554429H1
acagaaatcaagtgatgaagtcccaagacttgccggaaggatgcgtcgcacacatattgtcgtacatttgtactcctgaagacatagtcaggctctccctcgtttccaaggccttttattctgcagctgattacgacactgtgtgggatgttttataccctctgatttctcctctaccatttctccactttcttcctctaactctaagaaggatctctatttcactctctccgaccgtcccaccatcatcgaccagggtagaaagagctttcaatggaaa

SEQ ID NO: 890 - DNA, 269 bp, Glycine max
  Clone ID: 700554431H1
ctctccactggttcttcatctgcatgcacacagttgcatagttttggaaaccaagaattcctgaagaagggtagcatcaacaagcagttctgaaaatggagatcaccaatgtcagtgagtatgaggctattgcaaagcaaagttgccaaagatggcgtttgactactacgcatctggtgcagaggaccagcggactctgcaagagaacagaaatgccttttccagaattttgtttcggccagtattcttattgatgtgagcagatagat

SEQ ID NO: 891 - DNA, 267 bp, Glycine max
  unsure (1)..(267): unsure at all n locations; Clone ID: 700554432H1
ttcttccccaccatcacaccacncaaacctccactctccctgccatggtcatgggagcntttcgccacttcgaaccggtttccnntgcagcaccgaaaaccggtttnaccaaaccgtggcctcggacttggacggcaccctcctggtgtcccctagcgcctttccttactacatgctcgtngccatcgaagccggcagcttcctccgtggcttgtcctcttggatccgtcctttcgtgtattccgtnnaatcttctcgaaaccgggc

SEQ ID NO: 892 - DNA, 284 bp, Glycine max
  unsure (1)..(284): unsure at all n locations; Clone ID: 700554433H1
cagaaaagccaacctatccaagtgattcaaccaatcaacggtgatcccttcattggaagccttgaaaccccagttacatccagccccttgattgcatggtacttatcgaacctccccgcatacaggaccgcagtgagcccactactaaagggatcgaggtgggcctggcccatggctaccttctggtgggcccattcgtgaaggccgggcctctgaggaacaccgagatcgccgggcaagcangctctctcgccgctggtgggcttgtggtgatcctcagcctt

SEQ ID NO: 893 - DNA, 277 bp, Glycine max
  unsure (1)..(277): unsure at all n locations; Clone ID: 700554434H1
gtggtactaacatatgccttcgccaggtaacagcgaaggcagtgtatggagccattgccaagtataaagtgactcatttttgtgcagcaccagtggttcttaacacactaattaatgccccagctgaggacaccattcttcctctacccatgttgtgcatgtgaatacagctggggctgcacctcctccttctgttctttccggcagtcngaacgtggattcgtgtcacacacacttatggtctctnagaaacctatngcccctctgtctatgtgcc

SEQ ID NO: 894 - DNA, 273 bp, Glycine max
  unsure (1)..(273): unsure at all n locations; Clone ID: 700554435H1
ggcttcactgggtagaatttcaaaataaattctaccatggtgatggctacaagttcaggcctttttcatttgcctccttaacagaggatgacgattgatccattcatatgtatggtttcatggcaactatatagaaagggnattttcccaagtgaanggagcattaaatgagaatttgtagtgncnggaccnaattggcngcnaangntgttanggttgctgnnggaatccgcctngnatggncnggnaacnaaaantcngnncntttcccag

SEQ ID NO: 895 - DNA, 227 bp, Glycine max
  unsure (1)..(227): unsure at all n locations; Clone ID: 700554436H1
atggattttgcgaaatcttttgcagggtgaatttgtaagggaaataattgttcaagaatttgctanaggtttagatncacttggnctaagcaaaccatggagacagctgctgcccgangttcntatcagtaggtngcntntaatcccccttanngaccnnngnaggtnntaacnaactngacanatccngagccntnangcnatngcggttgggggcagaagnnaaa

SEQ ID NO: 896 - DNA, 277 bp, Glycine max
  unsure (1)..(277): unsure at all n locations; Clone ID: 700554437H1
actggaactagaagtagcagtcactaagttttgtgcataaccttaaaccatgtcattgnctaccactactagtggtcatcatctatttactctgcacttacatgccaagaaccacccanattcaccccaaccttggttttcctccacnacnaggttcttttcttcnaaaagcccctcatattcnggnctttccaattgtttctcaaacacccttttgtcaagactttgngttttgctgtcaggcttnatctggggttggctcagaagcatccaanca

SEQ ID NO: 897 - DNA, 284 bp, Glycine max
  unsure (1)..(284): unsure at all n locations; Clone ID: 700554438H1
aattgatacaggttaaagaattggagaatttgaaggaggctgtaatgcaatctgatagcaaggatggagcaaaggaaaaatttgatcctgagaaagcacatagatgaatatctaccagtgcngggttatgagccaaagaatgacccanctaattgcnagtcctntccctggttgctgtatnaatcttagccatgtcagttatcaaaaggataccaacctcagttctatggggatattttgcttacatggcattgatagtctcccgggaatcagttctgggaagg

SEQ ID NO: 898 - DNA, 281 bp, Glycine max
  Clone ID: 700554439H1
cgaatttcattgcagagtgttattttgagtatcagcatcaatggctccaattgcagtgggaaacgtgattccagacggcattttggcttacttggatgaagaaaacaaaccccaactgtcctccattccactctctcgccaccggcaaaaagtcatcatctttggggttcccggtgccttcactcctacttgcagcttgaagcacgttcctggcttcattgagagagcagaagagctgaaaggaagggtgtggacgaaataatctgtatcagtgtgaatga

SEQ ID NO: 899 - DNA, 268 bp, Glycine max
  unsure (1)..(268): unsure at all n locations; Clone ID: 700554440H1
cacacctctcctcgttcacgctacccctttctgctcttcttctacctttcaagttntaaaagtataaagatggcagagacattcctatttacctcagagtcggtgaacgagggacacctgacaagnctgcgaccaaactccgatgctgtcctcgacgcttgcctcgagcaggacccagacagcaaagttgcctgcgaaacatgcaccaaaaccaattggtcatggtcttcggagaaatcacgaccaggccaagttgactacgagaaga

SEQ ID NO: 900 - DNA, 282 bp, Glycine max
  unsure (1)..(282): unsure at all n locations; Clone ID: 700554441H1
tgagtcttgcaattgaagttgaagtcttgcccttctctcttcaanttccaaacacaagacatcatcatccatggctgcntccgtctccactgtcggagtgtcaacagagctcttttgaacctgaatgggtctggacctggggtttcactcccagttcatccttctttgggagcagcttgaagaaggttattggctcaagggtccccaacacaaagatttcctctggaagcttcaagattgttgctgtagaagagaagaaagagattgaagagacccagcaga

SEQ ID NO: 901 - DNA, 266 bp, Glycine max
  Clone ID: 700554444H1
actggggagccatcataggttggtatctctgcatgtttcgccctgacaaagttaaggcctatgtctgcctcagtgttcttttctccgcagagacccaaacatcagaacggtagatggcatgcgtgctttgtatggagacgactactatgtctgcagatttcagaaaccaggcgaaatggaagctcagatggctgaagttggcactgggtatgttctcaaaaacatccttacaagtcgcaaaactggtcctccatccttccgcatgg

SEQ ID NO: 902 - DNA, 275 bp, Glycine max
  unsure (1)..(275): unsure at all n locations; Clone ID: 700554445H1
ccttcttattcgtcgttcanttcaatttctcgcgagtttttcttccatatgctaccaatcgntgccgttgatctncgcgccggcgaatttcagttttgattctccgccaccgttttggctgttgtnactttggttcttccgagagaagggagccatatatagaaagtattttatggtgcgccgatgagcagaactgatgttattggcagtagaaggaggaggattcttctctgcttcggcttcagggtatataagggcctgagccttctcctctt

SEQ ID NO: 903 - DNA, 278 bp, Glycine max
  unsure (1)..(278): unsure at all n locations; Clone ID: 700554446H1
gcacgcacgtatactttgctctgctccttactccaaagtgcccctctctcgcgcttcgtctttcaccaccgtaacaatttttccgcagcttcaacgcaacntnanaacgaaaatccagcattcactccgctagcgtctttnactcaaanatttggtgaaatagtggaacgtttcgtgaaactcccaaaccagaagccgaagtttccaagtgaaaatggacggtagtttgacgatgaagctgaaccggccgttacaatccgcgagtacctggaggaagt

SEQ ID NO: 904 - DNA, 281 bp, Glycine max
  unsure (1)..(281): unsure at all n locations; Clone ID: 700554447H1
gtcttngtncttcagcagaaggancangncaatntcccccagnnattntgtnnnnccgcatncntncagnttccgccanggncatgtaatcttctgantgttctgcattcccttttccacaataactananggncttttttctcctgcaaaccttttcanncttgcactgtgggcagcgatctctgtcgttgatggtttctccagtacccttgcattcatgcaagcatgctgcatctgctgaaanttggacgggccaagatgtcttatagaaaccttcata

SEQ ID NO: 905 - DNA, 277 bp, Glycine max
  unsure (1)..(277): unsure at all n locations; Clone ID: 700554449H1
aattctcccaactcaatttttctctcaaccggcccaatttagcataagcccagcatggccaccgcaacagcagcagccacctcgtccttcatggggacgcgcctcctggaggcccactccggggcggggcgggtgcaggcccggttcgggtttggcaagaagaaagccgccgccccgaagaaagtttccagggggtcgggctctagctccgatagcccctgtggtatccgggcgccaaagcgccgagtacctggatngganccttgtcggagatang

SEQ ID NO: 906 - DNA, 279 bp, Glycine max
  unsure (1)..(279): unsure at all n locations; Clone ID: 700554452H1
gagaaatagtacatatgtaatgtatgattttncatgattacagaacctactgccttccttctgaggngcgcctttaatgtntgtgcttttgtatgcttgagngntttttagtaaattatttttggncactcccnaggtnattcgggttcaattgtantttnaanggncnanaggatgattataagcacagtccagatgattcaaccngtnaacaantcctgtnattggntncngcnccnatctnaggaccccttnacatancgccttggggttttcnag

SEQ ID NO: 907 - DNA, 247 bp, Glycine max
  unsure (1)..(247): unsure at all n locations; Clone ID: 700554453H1
gcacgtattgttctaatccacnaaaataatggccttaaattacaacattgccctcgccttctctacggttctcacgctgcttctcctttcccttaccaacccntgggggagttcgtnnaggagnagcnntaagttcccaagtaccacaacggccaantcctgaaggggcgcatcaccgtnaatctcatctggtacggaacttcaccccgatccaacggtccataatcgtggattcataaactcataa

SEQ ID NO: 908 - DNA, 280 bp, Glycine max
  unsure (1)..(280): unsure at all n locations; Clone ID: 700554454H1
ggcaatgtcaatgttgagatcagtttgtcagttgagagtgggagtggcaactccaaaaccttgcctccatccctcaatcttcttattctccctttctctctctcacaaacactcacatctcaaccntcctttccccagaaccttccgtttccacccactttnactccntctttnancctttgtgctcttnatgcctcccaaagnaacagttcgtaggcangtgctagtggtgctgctgaaggtgataggccaagggagatattggtgcagcattgttggt

SEQ ID NO: 909 - DNA, 283 bp, Glycine max
  unsure (1)..(283): unsure at all n locations; Clone ID: 700554455H1
gantaatcccttgtagtactggataanncaccatcaacctcgtattccgatcgtcatacagtcnctgttctcanncttctcagcgatctgagttcacctgcgancaaaacggcttgtantcttattagagaaatccacgttcgctcctcgcaatgttgatgtcgttttcgaacccgatctcctttaaacgactcctgggaatccccaaacacgcgtggtgaaaagcctcctncatgnanaaaaaatcccgaaaganagagacatccctgacgatctggtcttg

SEQ ID NO: 910 - DNA, 279 bp, Glycine max
  Clone ID: 700554457H1
cactctctgctcctagggtttctccttcgagtgagggaaatggctcccaaaccgcctagtacgggtctgtttgttggactgaacaagggtcacgtcgtcaccaagaaggaattgcccccacgcccctcagatcgtaaggggaaaacaagcaagagggtgcactttgtgaggaacctcataagagaggttgctggttttgcaccctatgaaaagcgtataactgagttgctgaaggttgggaaggataagagggcatgaagttgcaaagagaaagcttgg

SEQ ID NO: 911 - DNA, 277 bp, Glycine max
  Clone ID: 700554458H1
gcaaatgacacagcacaatttgctgagctcttgacacaaggagaactgacccgtagagcatgggaaaaggatgttcaggtgatgaatgaaggactggaccacatcccaatgcacaagattcctgaaaacatgcagaaacagttagatggtgtagtgaagcgcctttttacactcttggtcctttaacaactgatattgcccccggctatgatcacatcacctctgcaattggtgctgccaatattggggcattggtatgctcttctctgttatgtga

SEQ ID NO: 912 - DNA, 197 bp, Glycine max
  unsure (1)..(197): unsure at all n locations; Clone ID: 700554459H1
anttataacaacaacatggcgctttctccggaaacgtttacaacncganaacgacgnccccgaaggtcgtcgtanangtaccccgaaggtaaacgaccttagacgtgangagntcttngcttncaactancggatcantatgttccctaantctcacagccaccctcttaaaccgtgtttcctcttccacnatncgt

SEQ ID NO: 913 - DNA, 273 bp, Glycine max
  unsure (1)..(273): unsure at all n locations; Clone ID: 700554460H1
cctttgttcactcttcttctcttgcggctagggttttagcgcanttcttctagatttaaggaagatgggtaagganaaggttcacatcagtattgtggtcattggccatgtcgactctgggaaatccactaccactggtcaccgatttacaagcttggaggcattgacaagcgtgttattgagaggtttgagaaggaagctgctgagatgaacaagaggtctttcaagtatgcctgggtgctggacaaattaaggctgagcgtgaaagaggaa

SEQ ID NO: 914 - DNA, 276 bp, Glycine max
  unsure (1)..(276): unsure at all n locations; Clone ID: 700554462H1
aaagggtttccgatcaccgaacggatcaaggaggatgaagatagcggtggaagggtgcatgcacggggacctggacnatgtctacagaacccttcaacagttggagaaatctgaaaacacganaatcgaccttctcctctgctgggngatttccaagccgtgaggaacgagcatgacttgaagagcctgaacgtccctctcaaataccgctccatgaactccttctggaagtactattccggcgccgaggttgccccctagggcaccatcttcatc

SEQ ID NO: 915 - DNA, 274 bp, Glycine max
  unsure (1)..(274): unsure at all n locations; Clone ID: 700554466H1
gtgctgattacacaaggtcaattcatttgggcactgtctctgttccaaaaccctaatccttcgtcttccagaaaatggctgattctccccttgcaaggaattcaaggtccccttccccgtggaaagctcagtcgagatctaggtctaggtcaagatctaggtcgangtctangcctagacaaaggccaagatcccgttctagaagtcanggcangncnagatcaccaatcanggaangncaaggtcacccntcaggaangtccgancttcnaat

SEQ ID NO: 916 - DNA, 272 bp, Glycine max
  unsure (1)..(272): unsure at all n locations; Clone ID: 700554467H1
cagaaaagccaacctatcaagtgattcaaccaatcaacggtgatcccttcattggaagccttgaaaccccagttacatccagccccttgattgcatggtacttatcgaacctccccgcatacagggaccgcantgagcccatactaagagggatcgangtgggcctgggccatgggntacttcnggtnggcccntcntngagggcngggcttttgnggacaacnagnnggcngggaancaaggttttttngcggttgttggntnttgttanc

SEQ ID NO: 917 - DNA, 276 bp, Glycine max
  unsure (1)..(276): unsure at all n locations; Clone ID: 700554470H1
acaganatcaagtgatgaagtcccaagacttgccggaaggatgcgtcgcacacatattgtcgtacatttgtactcctgaagacatagtcaggctctccctcgttttccaagggcnttttattctgcagctgattacgacacctgtggggatcgttttataccctctgatttctcctctaccatttctccactttcttcctctaactctaagaaggatctctatttcatctctccgacgtcccaccatcatcgaccagggtagaaagagctttcatt

SEQ ID NO: 918 - DNA, 277 bp, Glycine max
  unsure (1)..(277): unsure at all n locations; Clone ID: 700554471H1
agtgtttgaagatcagaaaagaattncacgtgaactccaggaacgactggcagagaaagaattccaagtaattgaaggggagaagttaaggaaaaaattgcataacactatnctggagctaaaanganatattcgngtgttctgccgtgtccgacctttgctaccggatgatggtcctggaacagatatggttgtntcatatcccacgtcaaccgaagctcttggccggggtattgaattactacagagcgggcagaagtacccttttactttgaca

SEQ ID NO: 919 - DNA, 274 bp, Glycine max
  unsure (1)..(274): unsure at all n locations; Clone ID: 700554475H1
cttccctacaactccaaacancaagacatcttcatccatggctgcatccgtctccactgtcggagctgtcaacagagtcttttgaacctgaatggttctggagctggagcttcagcnccannttcagccttctttgggaccgcttgaagaaggttattgcctcaagggtccccaacagcaaggtttccggtggaagcttcaagattgttgctgtagaagagaagaaagagattgaagagacccagcagaccgacaaggacagatggaagggtct

SEQ ID NO: 920 - DNA, 266 bp, Glycine max
  Clone ID: 700554477H1
caaatcaaagccatggccacctccaacttctctattgttctctccgtctccctaggccttctttttggtgctacttaccaagggcacactcgaccgataccgtttctttcaccttcaacaagttcaacccagtcaaccaaacattatgctccaaaaagatgctagtatttcatcctctggggtgttacaactcaccaaagttggcagcaacggcgtgcccacctcgggatctctcggtcgtgccctttacgctgccccaatccaga

SEQ ID NO: 921 - DNA, 262 bp, Glycine max
  unsure (1)..(262): unsure at all n locations; Clone ID: 700554478H1
tgggaattttgggggctagaagttggctctgtaggagcatttcttcaagtccattgcgggtgtgtgttgttggaagtggtctgctggtttccncactgccgagaagatgttgaaggctcaccaacaagcaaagttgatatcattgacaggttgcccacggcttttgggttggttcgctccgttgttgcacccgatcaccctgaaaccaagaaaacttgcaacaaattgtcatcaaccagttttcaaaggtggcacaacatga

SEQ ID NO: 922 - DNA, 272 bp, Glycine max
  unsure (1)..(272): unsure at all n locations; Clone ID: 700554479H1
gaaaaagaaaagccttcaatcatatagcattctaagaaatgaagagccctaccattttcattctctttctactttctgccttctacacctcactcctaccttcagccaccgctcaagtcgtggttgacatggaaggtaatgtcttcaaaatggtgggaaatattatgtgttgccagtaatagagtcatcatntggtggaataagagtagccgcaactggaaaagaaagatgccctctcatgttgtacaatctgccgatccgtatgataaggg

SEQ ID NO: 923 - DNA, 266 bp, Glycine max
  unsure (1)..(266): unsure at all n locations; Clone ID: 700554480H1
ccaaaacccgtgtctgtgtttgtttccactttgcaaattcagtgtgtacccaggaatctcttgattgagaaagtgtgttagggtaagagttgtgtcgtgtccacgagacactgggagaaagaaagtgtgtgtgnnttgtttaaactgaattttcattntncttaggccatggccacnntgttcggaaaaaccanccttancttnancggganaannaaaaanggcntttggtttngggnaaaaanaagggncaacccccccccnaa

SEQ ID NO: 924 - DNA, 272 bp, Glycine max
  unsure (1)..(272): unsure at all n locations; Clone ID: 700554482H1
ctccgcactccgtcttcatcaatcagcatcatcaccgctccaacacaggggaaaatgagggagatccttcacgttcagggagggcaatgcgggaaccagatcggttcgaagttctgggaagtggtgtgcgacgagcacggcatagatccgacggggaagtacgtcggaaactcagntctacaactcnaacgcgtgaacgtgtatacaacgaagnttcctgcnggcggnttgttccaagcncntgntngntgacctngaacccngaacattgg

SEQ ID NO: 925 - DNA, 266 bp, Glycine max
  unsure (1)..(266): unsure at all n locations; Clone ID: 700554483H1
ttcttcatcttccttcccctctctcattcaagacaggcctgtttttgctgcccctgcccccatcatcaccncaactgtgagagaggatatggcaaaggaatacgagaaagctattgaagaacttcagaaattgttganggggagatgaattcaaagcggaantgnngaaaanttggancnnntaanggctcnctagggaaacntcannggntggaatccntaatcggagncgnaagccaggntcaaagnnggtttcnatccattca

SEQ ID NO: 926 - DNA, 223 bp, Glycine max
  unsure (1)..(223): unsure at all n locations; Clone ID: 700554484H1
acaanaatgactttcgaagngaagacaatttatcaaacctctttagcctcaattcccaactacacccntctagagtgtgtctgggggnatgcttccaangtggnnaaccatcttccttnngnttcnttatgggtacatggacaacaatcnaattcccacaatagtcttcaagggtngcccaanaacttcnatgcttcataacatgcataatcttngcttctcc

SEQ ID NO: 927 - DNA, 277 bp, Glycine max
  unsure (1)..(277): unsure at all n locations; Clone ID: 700554485H1
agccttcccccggtttcgccgccttaaccgaatctctcctncgacggggaacaggacagtcacggcgtcatcgtaaacagcttcgccgatctcgacgccgagtaacactcaacacttaccaggaaatttacagggcgcaaggtgtggcatgttgggcnaagctccctccatggtgcaaaagacggtgaaaagtagtactgttgatgagagtagacacgattgtctcacgtggcttgatcaaagaaagaatcttcggttctctacatttgtttcggaa

SEQ ID NO: 928 - DNA, 277 bp, Glycine max
  unsure (1)..(277): unsure at all n locations; Clone ID: 700554487H1
gtcttgagccatttactttcctcaacttcaatttctntagctagctactagttccagtgttcagcatatgtganatgaaatgagaagaaccatgtcaaatgcatcagcatgcttctanttctttggcttttgcagtattagtagcacttccanaatgctgaatgccgtttctcttcggcctagtgtttctgatggggttnatgcagttcaattacctcaagagtcttcttatctacaatcaaagaccaaagtgttgttgtcgagtcnncttctgatg

SEQ ID NO: 929 - DNA, 272 bp, Glycine max
  Clone ID: 700554488H1
ctgaaatcaaggttgttgctggtgacccttataactcagacccacaagatccagaattcatgggtgttgaagtcagagagcgtgtacttccaaggagaggaactttctgttgtcttgaccaaaattaacatggttgatttgcattgggagctacagaagatagagtgtgtggaacaattgacattgagaaagccctgactgagggtgtcaaggcatttgagcctggactatggctaaagctaataggggaatctatatgttgatgaagttaa

SEQ ID NO: 930 - DNA, 115 bp, Glycine max
  unsure (1)..(115): unsure at all n locations; Clone ID: 700554490H1
cgtcattgtatacacgcagtcgcattttcctaatgttaggggcaagtttgcaaatttaaattggtttttttatcacatgatggtttttttaaaaaanannnaaaaaaaanacang

SEQ ID NO: 931 - DNA, 269 bp, Glycine max
  Clone ID: 700554494H1
gaaactttcaaaagctgttaaagattgtttagtcttgcatccatagtttataccttttcttttatttcttcttttgttctcattcaaattcgcctgtattctttcttatggtatactgttggtaaaatatctctcaacttcaaagcctctctttatcccttaaacaaacagacacgcacggagagacaaatcctactactaactcttgtttatcttagtgtgtcatcacactgtggacggttctgtgtcaaaacaaaccaagattttga

SEQ ID NO: 932 - DNA, 272 bp, Glycine max
  unsure (1)..(272): unsure at all n locations; Clone ID: 700554495H1
gactccaaacacaccaattgcatttgcattaccattcacaatggcaatctcctccacttccaactccctcattcccnccaaatctctaatcccccaatcccaccccctcattcccaacaccaggcccgccctccggccaagcccggcccatccccttccatcntcgccgttcacgccgccgatccccgccnaaaaccccgtcgtcaccgacaagcccaagccccaagcccaacaacctcccccggcctcggcccgggcaagaaatgggccgt

SEQ ID NO: 933 - DNA, 272 bp, Glycine max
  unsure (1)..(272): unsure at all n locations; Clone ID: 700554496H1
caccactcatcacagactctgcttcagatccccctcaccaaaaataaaacctgccaaatctcattacacacacagnnacaacgaatgtgcatccataaacatcaagtaatgaggtaatctaaagtgggnaaaaatgggttgggtcggttcaaaccgacgctgaagaggaagagggttccgatgagggtctggttaagcttccaaaaatcaatgggtgtcctcgtgggtggaaaccatattcctccaggttttgcactcgctaatccccctct

SEQ ID NO: 934 - DNA, 290 bp, Glycine max
  unsure (1)..(290): unsure at all n locations; Clone ID: 700554502H1
taatttattctgtttgtggtctcactagctagaaacaacatcactacacacaaatggcacntactttatccactaatctggctcttaaccttcccacatcgaggtatgttcgtccctcgagaccaacccaggtgaagcccatgaaggtcatgatgggtgatgcaaganaaaagctagaacatgtccatgtgcctaaacacaacaagcaccaccagcccctccccaaaaacaaagttgctcctaccccacccgtagtaattaattaagctcaatcactctttcacataatt

SEQ ID NO: 935 - DNA, 198 bp, Glycine max
  Clone ID: 700554505H1
gtccagagctttggctagacaatggacatcatattgttaatagtttataacttcattgcctagaattttggtcattcaaatcattttgttttttgccaatataataagtgcattcgggatttgtttattctctgttatagtaggttttgttctgatacttggaaattttgttttatcaataaaaagctgattggcaac

SEQ ID NO: 936 - DNA, 291 bp, Glycine max
  Clone ID: 700554509H1
gcgaacaatttagatcagactctaaaacagttaaccaacaagctttcttttatgctagtgaacgcgaagtccatcacaacgacatatttatattcggcatagataacaccgtactctctaatatcccatactatgaaaaacatggatatggggtggaggaatttaatgaaaccttatatgatgaatgggttaacaagggcgacgcaccggcattgccagagactcttaaaaattacaacaagctgttgtctcttggcttcaagattgtattcttgtcaggaagatatcttg

SEQ ID NO: 937 - DNA, 70 bp, Glycine max
  Clone ID: 700554510H1
cataatactaaggcaaatctatactctgtaaacatgattttcagactatctcatcttctctggtttattt

SEQ ID NO: 938 - DNA, 284 bp, Glycine max
  Clone ID: 700554512H1
gtttgattttgcgctttcactagtttttcttcgacatgactcaagatctccgagatgagggatcgctcaacgccttccaactctgtttctttgcctgctccatctactttgcagcatttgaaggagatagcgtctcttatcgagaccggttcgtactcgaaggaagttcgtagaattgctcgcgctgttcgccttacaattgcgttgaggcggaaattgacagcatccgctatctctctttctcgaccttgttctcatccaggctctgaattcacgccaattgt

SEQ ID NO: 939 - DNA, 285 bp, Glycine max
  unsure (1)..(285): unsure at all n locations; Clone ID: 700554513H1
gaaaaacaaaagagtagtggcctttaggtggtgaagaacaagagctcaaatcaaatcgaatcgaaaaaagaaagaaagatcatattcatggcgatggcaagcctggctcgacggaagggttacgccgtcgttttgtcgtcgaggtcgtcgttttgtctgacaagctggaggggattcgcgtccggatctgacgaaaacgacgtcgtctncatcggcggcggtcccggcggctactggccgccatcaaagccgcgcanttcggtctgaaaaccattgcatcgaaaa

SEQ ID NO: 940 - DNA, 280 bp, Glycine max
  Clone ID: 700554514H1
tcatcacaaggacaaataagttaaggttccacgttagtaattttttggtgtttgaattgaagttaaagggccatggcttcaggatccaaatcagtagcctctatcctcttggcactgaatctagtgctgtacttcattgtgcttgtaattgcttcttgggcagtgaatcatgggattcaaaggtctggcgaaacagcatctgttttgtccatccggctcgcatattccaatatattcccaagggaaacatgacaatggttttttcgtaatttgtctctgg

SEQ ID NO: 941 - DNA, 291 bp, Glycine max
  unsure (1)..(291): unsure at all n locations; Clone ID: 700554515H1
ctacgctctcccaaccgccagtcctctgacccgaagagcgaaccataatggaagagtaaattaccggaaaccgaataaccgtttctccgtgaaagcctccgccaaagagattgcctttgaccagcattcccgctctgctatgcaggnccggcattgacaagctcgccgacgctgttgggctcactcttgggcccagagggaggaatgttgtgttggatgagtttggaagtcctaaagtggttcaacgatggtgttcaccatgctacgcgcaatcgagttcccgatcctatg

SEQ ID NO: 942 - DNA, 282 bp, Glycine max
  unsure (1)..(282): unsure at all n locations; Clone ID: 700554516H1
ggcttttacagaaggtgggattttgactagctgggtntttggctgttgagtttatggagggccaagttcctgttgaacagtgtttgtnttgcctttatctgcagcttttaattgaaccaatcctaccctctttgtttccatatgaaaanatcggtnttntgtgattcctccgctcattgttgttgaagggtctcgtgaaatcaatctagttttgagacctgtttactggcagaggtgacggatttcagttttgtaagtgcagatcataataataagttttta

SEQ ID NO: 943 - DNA, 290 bp, Glycine max
  unsure (1)..(290): unsure at all n locations; Clone ID: 700554517H1
agaaaaacaagtagttgagaactaagaagaaggaaatggcttcctcaatgntntcctccccagctgttaccaccgtcaaccgtgccggtgccggcatggttgctccattcaccggcctcaaatccatggctggcttccccacgaggaagaccaacaatgacattacctccattgctagcaacggtggaagagtacaatgcatgcaggtgtaggccaccaattggcaagnagaagttcgagactctttcctacttgccagacctcgatgatgcccaattggcaaaggagtc

SEQ ID NO: 944 - DNA, 285 bp, Glycine max
  Clone ID: 700554518H1
cttgataggaagactggcagcaacttgcttcagtggcctgttgctgaggtggagagtttgagattgagaagtgatgaattcaaaaatttgaaggctaaaccagggtcagtcgtgtcaatagatattgaaacagccacacagttggacattgttgccgagtttgagatagacaaggaaacccttgagaaaacacctgaatccaacgaggagtacacgtgtggcaacagtggtggatctaaacaacgtggtgcctaggaccttttggtctttggttttggcagatga

SEQ ID NO: 945 - DNA, 278 bp, Glycine max
  unsure (1)..(278): unsure at all n locations; Clone ID: 700554519H1
gagatatacttgagaaagttgaaactccatgcaccatcattcagacttccagtgacattgttgttccacacaaagcagcggtnntacatggagagcaaaattaaagggaaagttacattggaggttgtagacaccaaagggcactttcctcagctaactgcaagccttcagctagttgatgtgattaagggtgttctggatgataattctcagtttcatcctttgtttagttttatacctgtttctcattcattataggttgagtagnccgtgagatt

SEQ ID NO: 946 - DNA, 290 bp, Glycine max
  unsure (1)..(290): unsure at all n locations; Clone ID: 700554520H1
atcgaaaccctgatctcccacaccgtcctccgctcccttccttccctccgccaagcattccactccctctccgccatcaaacaccctctccgccgtcgtcgtagacctcttctccaccgacgccttcgacgtcgccgccgaattcaatgcctccccctacgtcttctatccctccactgccaccgtcctctnccttgttcttccaccttccccaccctncgaccagcaggtccagtgcgagttccgagacctcccagaaccggtcagcatccccggttgcatcctcttcc

SEQ ID NO: 947 - DNA, 286 bp, Glycine max
  unsure (1)..(286): unsure at all n locations; Clone ID: 700554521H1
aaggcagaaagcaagctcatcctagagttttaaaaatggcagcagcctcctccatggctctctcttccccatccttggctggcaaggccgtgaagctgggcccatcagcccccgaagtcgggagggtcagcatgaggaagaccgtcaccaagcaggcctcctccggaagcccatggtacggcccagaccgcgtcaagtacttgggcccattctctggcgagcccccgtcctaccttcactggcgagttcccaggtggattacggctgggacatgctgggnttcggc

SEQ ID NO: 948 - DNA, 286 bp, Glycine max
  unsure (1)..(286): unsure at all n locations; Clone ID: 700554522H1
aatcgttctaatccacaaaaaatgaccttaaattacaacattgccctcgccttctctgcggtgctcacnctgctcctctttcccctactgaccgtaggggagctcgtggaggagcagccactagtcctcaagtaccacaacggccagctcctgaagggccgcatcaccgtcaatctcatctggtacggcaccttcaccccgatccaacggtccataatcgtggacttcataaactcgttaagcagcgcgccaaacgcgcctctcccctcgaccgccacgtggtgga

SEQ ID NO: 949 - DNA, 284 bp, Glycine max
  unsure (1)..(284): unsure at all n locations; Clone ID: 700554523H1
gcaaaggaaggaggtggaggaggatgttttgtggtggtgcgactggtgnngaggaggtcgtgtgactgctgtgaagaaggtgaagtcatgggagaagaagttgccatggcgggagtggtttgtacaaagagaaaggtgttagggtcggagaaggatagtttggtattttgcaagcaaaatgagaggtgtaagatacacatatgagagtggctccatcaaatgccgttatcacctactatcaatccaggcccataaaaagaagcatttcatttttcggntcggnt

SEQ ID NO: 950 - DNA, 283 bp, Glycine max
  unsure (1)..(283): unsure at all n locations; Clone ID: 700554524H1
tgaagttgtttgttttctttgttgctgcagtagttttggtagcatggccatgccatggcgcaggctaccaaaggttccctctccgaatgaaaactggctatggtgagcgttcttcggaggtaaaatgcgcaagttttaggcttgctgtggaagcacannacatccgagccttaaaaccattcctgaagagtgcgttgaaccaacaaaggactacattaatggcgaacaatttagatcagactctaaaacattaaccaacaagctttctttatgctagtgaagc

SEQ ID NO: 951 - DNA, 287 bp, Glycine max
  unsure (1)..(287): unsure at all n locations; Clone ID: 700554525H1
ctggaataacagttagaatggttactggtgacaacattaatactgcaaancgctatagccagggagtgtgggattttaactgatgatggcatagccattgaaggtccagaatttagagagaagagtcaggaagagttgcttgaactgattcccaaaattcaggttatggctcgatcctcacctttagacaaacacacactggtgaaacacttgcgtaccacttttggggaagtggtagctgtaacaggtgatggaactaatgatgccccagcacttcatgaagctga

SEQ ID NO: 952 - DNA, 284 bp, Glycine max
  Clone ID: 700554527H1
gcaatgtcaatgttgagatcagtttgtcagttgagagtgggagtggcaactccaaaaccttgcctccatccctcaatcttcttattctccctttctctctctcacaacactcacactctcacctctttccccagaaccttccgtttccacccactttcactccctctttcaccctttgtgctcttcatgcctcccaaagcaacagcttcgtatggcactgtgctagtggtgctgctgaaggtgataggccaagggagatatggtgcagcattgttggtaaaaga

SEQ ID NO: 953 - DNA, 281 bp, Glycine max
  Clone ID: 700554528H1
gacggaaagactactctcttacatttcgttgtacaggaaattgtcagaaccgagggttctcatatttctggttctaatcatccccatgcctctgacaatggccaccaatatactctccaagatgaggttgacttcaagaagcttggtctgcaagttgtttcaggcttgagtggtgagctcaccaatgttaaaaaagcagctgctatggattcggacgtgctcagtagtgatgttgctaaacttccagaggaatcgaaaaagttgtgcaattgtaaaatgaa

SEQ ID NO: 954 - DNA, 281 bp, Glycine max
  Clone ID: 700554529H1
taatttattctgtttgtggtctcactagctagaaacaacatcactacacacaaatggcacatactttatccactaatctggctcttaaccttcccacatcgaggtatgttcgtccctcgagaccaacccaggtgaagcccatgaaggtcatgatgggtgatgcaagagaaaagctagaacatgtccatgtgcctaaacacaacaagcaccaccagcccctccccaaaaacaaagttgctcctaccccacccgtagtaattattaagcttcaatcatcttca

SEQ ID NO: 955 - DNA, 278 bp, Glycine max
  unsure (1)..(278): unsure at all n locations; Clone ID: 700554530H1
ggaaggaaaaatggagttgttcttctacgcggtgttcggcggtttgggagcggttgttgcagtgacggagctgagcaagagcaacaaggaccgaatcaacacctcttccgcattcaattccttcaagaacaactacctcatcgtctattccctcatgatggctggagattggctacaaggtccatatgtctactacctttacngtacatatggatatgggaagggagncataggacaactcttcatgctggttttgggtctccagctcttggaaaatg

SEQ ID NO: 956 - DNA, 280 bp, Glycine max
  Clone ID: 700554531H1
gcacaatgtcaacctcttccataaacgggtggtgcctctcttccatctccccagccaaaacctctctcaggaaggccacattacgcccttccgtcttcgcaacccttaacactccttcttctccttcctcttcatcttccttcccctctctcattcaagacaggcctgtttttgctgcccctgcccccatcatcaccccaactgtgagagaggatatggcaaaggaatacgagaaagctattgaagaattcagaaatgttgaggagaagatgaatcaaag

SEQ ID NO: 957 - DNA, 286 bp, Glycine max
  unsure (1)..(286): unsure at all n locations; Clone ID: 700554533H1
tcaatctaaagttttttctcttccaaacaaacnntgngttcngncattncctatcctggcagaatgaatactcaattttgcagaanatcnaccccatcacgtgcatgcacccatcatccccacttcccacttcncttccttgtacactgtctcaccctcccacccacggttcttctttcatgccaatttctnancttctnccactcccatcttggaagaagaaccttcttccaacacccccatcatcatgtngtggangttaatttgatgtnagnagaannnncaa

SEQ ID NO: 958 - DNA, 288 bp, Glycine max
  unsure (1)..(288): unsure at all n locations; Clone ID: 700554534H1
ctctttttctcaaccaaaaggggttcaattctagctagttctattacatcgtccgcncaccatgaacatggcgattcgtgcttctgttcatggttttcgcagtttcatcagctttagacatgtcaataatatcacatgacaacgctcatgcggatagggccacgaggcgcaccgacgacgaggtgatgtcaatgttcgaggagtggctggtgaaacacgacaaggtgtacaacgcgctcggtgagaaggagaagaggtttcaaatcttcaagaacaatctgcgcttta

SEQ ID NO: 959 - DNA, 284 bp, Glycine max
  unsure (1)..(284): unsure at all n locations; Clone ID: 700554535H1
atcgttctaatccacaaaaaatgaccttaaattacaacattgccctcgccttctctgcggtgctcacnctgctcctctttcccctactgaccgtaggggagctcgtggaggagcagccactagtcctcaagtaccacaacggccagctcctgaagggccgcatcaccgtcaatctcatctggtacggcaccttcaccccgatccaacggtccataatcgtggacttcatanactcgttaagcagcgcgccaaacgcgcctctcccctcgaccgccacgtggtgg

SEQ ID NO: 960 - DNA, 283 bp, Glycine max
  Clone ID: 700554537H1
actggaactagaagtagcagtcactaagttttgtgcataaccttaaaccatgtcattgcctaccactactagtggtcactcatctatttactctgcacttacattgccaagaaccacccaaattcacccaaccttgttttctcccaccaccaagttcttttcttccaaaagcccctcatattcaggtctttccaattgtttctcaaacacccttttgtcaagacctttgctttttgctgtcaaggcttcatctggggttggctcagaagcatccaaacaggag

SEQ ID NO: 961 - DNA, 281 bp, Glycine max
  Clone ID: 700554538H1
attgcacaatgtcaacctcttccataaacgggtggtgcctctcttccatctccccagccaaaacctctctcaggaaggccacattacgcccttccgtcttcgcaacccttaacactccttcttctccttcctcttcatcttccttcccctctctcattcaagacaggcctgtttttgctgcccctgcccccatcatcaccccaactgtgagagaggatatggcaaaggaatacgagaaagctattgaagaattcagaaatgttgagggagaagagtgaatc

SEQ ID NO: 962 - DNA, 281 bp, Glycine max
  Clone ID: 700554539H1
ataagttccctaacattaccaagagattaaagagacctgctgttgctcttgtgtcaaccaatggtccctggatcacgtaagaacaccaattttactttttttggtttttgattctacaagtgcttttaactatggagtatacttgaaaatatgatgccacattgatgctggattgaccgtcattaactatgaaaggagggaaattctttcatgtcatatccaaattatgcgtgtgtgtctgtggatgttttcatatattggaagccatctatgtagaacct

SEQ ID NO: 963 - DNA, 281 bp, Glycine max
  unsure (1)..(281): unsure at all n locations; Clone ID: 700554540H1
tgcaattgaagttgaagtcttgcccttctctcttcaactccaaacanaagacatcatcatccatggctgcntccgtctccactgtcggagctgtcaacagagctcttttgaacctgaatgggtctggacctggggtttcagctcccagttcatncnnatttgggagcagcttgaagaaggttattggctcaagggtccccaacacaaagattcctctggaagcttcaagatgttgctgtagaagagaagaaagagatgaagagacccagcagaccgacaag

SEQ ID NO: 964 - DNA, 284 bp, Glycine max
  unsure (1)..(284): unsure at all n locations; Clone ID: 700554541H1
tggtaatggcagcgtcactacaagcagcagctactttcatgcaacccnccaagttgagcaggagcaacactttgcagcaaaagtctactcagtccatttccaaggnttttggtttggaacctgttggagctaaaaaggtcacatgctcccttcaggctgatcttaaggacttggctcacaagtgtgttgatgctaccaaaattgcaggattcgcccttgccacctctgccctcgttgtctctggggcaagtgctgaaggtgttccaaagaggctaacttcgacg

SEQ ID NO: 965 - DNA, 283 bp, Glycine max
  unsure (1)..(283): unsure at all n locations; Clone ID: 700554542H1
ctcatcacttactggaagccttgttgtgagtaagagaaaaggcttcctgcaccgagcacaccaacttgatacctctgattctttctttgcttagaattccacagaatatggagagncgntcttttcaatcactccccacctttggaattcaagggtttgagcaaggaggaggaagactcattgctagggcaagtagaaatatggaggtacatgacatgcttcacggactccgtggcttgaaagctgtcatagagctcgtatagcggacatactagaccgttag

SEQ ID NO: 966 - DNA, 282 bp, Glycine max
  Clone ID: 700554543H1
ctctcacttggggttgaagatgagaatttgtggagcagcaatcagcagcagctacaccaccacgtccaattcccttttagtgtttgcttcctcttccctctccagtcctgcaaaaaccaagttcctgccctcactttctagattttctgtcaagcgtccgtacttcctttcccaaacttatccgcgcattgctgtgaacaagccctccatgaacctgttgaacagactcgggtttggcagcgcaagagcaacagagaacaggattcatccattcctcaggtc

SEQ ID NO: 967 - DNA, 269 bp, Glycine max
  Clone ID: 700554544H1
actggggagccatcataggttggtatctctgcatgtttcgccctgacaaagttaaggcctatgtctgcctcagtgttccttttctccgcagagacccaaacatcagaacggtagatggcatgcgtgctttgtatggagacgactactatgtctgcagatttcagaaaccaggcgaaatggaagctcagatggctgaagttggcactgggtatgttctcaaaaacatcctacaagtcgcaaaactggtcctccatccttccgcatggaga

SEQ ID NO: 968 - DNA, 281 bp, Glycine max
  Clone ID: 700554545H1
ccccttcttattcgtcgttcagttcaatttctcgcgagtttttcttccatatgctaccaatcgttgccgttgatccacgcgccggcgaatttcagttttgattctccgccaccgttttggctgttgttactttggttcttccgagagaagggagccatatatagaaagtattttatggtgcgccgatgagcagaactgatgttattggcagtagaaggaggaggatcttctctgcttcggcttcagggtatactaagggcctgagccttctcctcttgggt

SEQ ID NO: 969 - DNA, 291 bp, Glycine max
  unsure (1)..(291): unsure at all n locations; Clone ID: 700554546H1
atgcttcagcagggatttggatcctcnttnntctcaaaaacgcagcaaccattcacaaaaacagttcaaagggttagcaagcaatgnganacacatgcncaatcctggagagnagtaaagaggagccgggatggccgtctttgcggacagcttcattgtngatcttttctaagcnttcccttgnagcattagctagnacattncattccnattcatacnctcanatttcagacctagcaacttccaagagaggcctannaccactgnaagatcgtcttgtgatgcccgaag

SEQ ID NO: 970 - DNA, 280 bp, Glycine max
  Clone ID: 700554547H1
gttagttcagttatggttgcagagattcctttcaaacacaaaagaacctcagattttggttcctaattgacaaccatggcgggtgcgtgcagagcacccatttgccatcttcctccgcagaagcccaaaaccagaatccagaattctcacagcagaagagctcaacttccaaataggcgtttgttcctcttctctctgcctctctctagtttccttctccttcctgttccaagctttggtgatggtaacaagcaatcatatgataaacttcaaagtgggc

SEQ ID NO: 971 - DNA, 284 bp, Glycine max
  unsure (1)..(284): unsure at all n locations; Clone ID: 700554548H1
tttttctctctttccgcggcctagatctgagcagtttggaaaccctaactgctctgcaccaacgacatcaccactnctctccgatcaactacctctttcgtcgccctaagtcatggcaggaattgcacccgagggatcacagtttgatgctcgtcaatatgatagcaagatgaatgagctgcttacgtccgatngtcaggatttcttcacatcctacgatgaggtttatgacagttttgatgctatgggcttgcaagagaatctcctgagaggcntttatgcat

SEQ ID NO: 972 - DNA, 283 bp, Glycine max
  unsure (1)..(283): unsure at all n locations; Clone ID: 700554550H1
caggtggataagtctgcatggatgactgatgaagnatttgctagagaaacgattgctggtgtaaatccaaacgtcattaagattcttgaggagttcccaccacgtagcaagctagatacacaagcctacggtgatcatacctgtataataacaaaacaacatttggaacctaacttgggtgggctcactgttgagcaggctatccagagcaagaagctgttcatcttagatcaccatggactatctcattccatatttgaggaaaataatgcaattaccacag

SEQ ID NO: 973 - DNA, 279 bp, Glycine max
  Clone ID: 700554551H1
tacaaaggttataaggctgttttggattcaaaatccattgatgaaacactggcattgcatgcaagttgggagccaaggcattcgaggtactgtcataggtttccatggcagcagtatgtaaaagtcggagctgttcttcgtcaatttggttatactgtggtagctttacatggctgtttgagaacagaaattcagacacctagatcagttagagccatgttcaaggacccctggcattcggctggcagcagaggtatccaaatacttgaccaatttcga

SEQ ID NO: 974 - DNA, 177 bp, Glycine max
  unsure (1)..(177): unsure at all n locations; Clone ID: 700554552H1
aaaattaatcatcttacttatttattctccgaaaatggttgatttacattggaaatcaaagatgccaagttccgacatgccttccaaaactctaaaactctctctctccgacaacaagtccttaccctctttgcaactacccttccgcaccacagatatctctcacgcngcaccttc

SEQ ID NO: 975 - DNA, 275 bp, Glycine max
  Clone ID: 700554553H1
tgaagccggtttacttgctctacgagaacgccgaatgaaggtgactcatgccgactttaagaaggccaaggataaagtgatgtttaagaagaaagaaggggtgcctgaagggctgtatatgtgaaatactatcctctatcatcctcgctcctcctgtctttttttcaatgttctagttatgcgaacaaatgataattcatttgtattatgcgaacaaatgtcagttttatttggaggcttgaatctcaacaacgatttaatcaatatagttttct

SEQ ID NO: 976 - DNA, 284 bp, Glycine max
  unsure (1)..(284): unsure at all n locations; Clone ID: 700554554H1
ctaacgatgataaaatcacaccaacagaagcacaacttcacgtacgattggataatccgaacacgtgtggacgggtactggaacgcgccgttgggtcccgaaaacttcgttccgggaaaatacctggtcccaccgggctcctcgtacggaggactcaacgaccgtttaggaatcggcgacctcagaacctcgacggtggcactgtgcgcgtctctctttagttccaaacctncgattccgctggctttcaacaacctcaatcggaggcagcgttcaaggcccaa

SEQ ID NO: 977 - DNA, 276 bp, Glycine max
  unsure (1)..(276): unsure at all n locations; Clone ID: 700554555H1
acccttctggtaatggtatgtggggttctccaggatgtcctaaaccttctgaatatgtncaangcctaataggtgttgttttacttgaccttgaactcactanaaaatgcaaagatgatgccaactgaggcanntataantgattgcatccggtatggagatcccaagcaccgcancactgatgttaaganggctctgaaagtgctattgagcagaatatggtggtgaaacagaattnnggtgcttgccgttntntgttngtangaagtanacttg

SEQ ID NO: 978 - DNA, 277 bp, Glycine max
  unsure (1)..(277): unsure at all n locations; Clone ID: 700554556H1
gagagcttccgtttaaggaggacgattcagaagatatggtgttgtacggngttctccgtgacgcattaatgtggggtgggtcccatccctcgatgccggctcgcccgagagcgtctcgtcgggttttccggcggtgaagctggagcctgatgtcatgccggcgttgattaatccgtgtccgcctccgggccggcggtggaggagaagaaggttgttccgccgaagggaagcactaccgcggcgtgcggcancggccgtggggaaattcgcggcggac

SEQ ID NO: 979 - DNA, 280 bp, Glycine max
  unsure (1)..(280): unsure at all n locations; Clone ID: 700554557H1
aggcantgtagattntcatcagnataggctcacntaacnanatacagttacgtatntttaangnacaangtgaatacacatgtagngataggcatgcnngacattatggctcttaaaagatggtgctcttaaganctgtatgttgnnatgngaggcnntgtagattttcatcagaataggctagaacaatgaacagcagntcattctttgatctttagagtttgtataggatatatattaccttgntacntacgtataattcggtntntaacagtatgac

SEQ ID NO: 980 - DNA, 280 bp, Glycine max
  unsure (1)..(280): unsure at all n locations; Clone ID: 700554558H1
cgacctcactcccctaaattcccccatcgccggctctctcacggccgaattcatcgcattcgccggttccgctacggtggctatcgcatgggtaagattctccgagaaaacgcgaanccgtcggcaaattcctcatcggcgtacccctctgcggcgcccgccaccacttcntcgacatcggtgacggagacggtgagggggtcacaccagttcaagatcacggggtactcgctctcgaagggatcgggattgggaatacatggctccgacgtgttttctg

SEQ ID NO: 981 - DNA, 273 bp, Glycine max
  Clone ID: 700554559H1
gttccatgtcagcagattctcgggttgaaaacagtgggagtgaagattcaactgatgatgataatatagatgtgaaagaaaatggttaccatgatgcagagaatgaagttgatcaggagacagatgatgatgctgatcgtgttcagagtggaaaattgagtgagagtagtggttatgctggcagtgatctttatgattacaaggcattggaggtgatgatctgatgttggatcctccatagtaaccagctaagacgaaatgctaatctgaagc

SEQ ID NO: 982 - DNA, 282 bp, Glycine max
  Clone ID: 700554560H1
ctctacctctgcatcgtcccacgtggcagctgagttgagatatcaagcagaagaagcactctggttctgaggcgcaacctcgtcccaacaaccatggcggtccctgctacatcctcagcccctgtccttcgacccatccgcaccaatcactccttctcttcccctttccgctctctcccctctcccgccgccagaaaacccctaaccgtcttcgccatggcccccaaaaagaaggtgaacaagttacatggataagtggaagaaggagtggtttggagcggg

SEQ ID NO: 983 - DNA, 269 bp, Glycine max
  unsure (1)..(269): unsure at all n locations; Clone ID: 700554561H1
cttgtggacctaacagtgatagagatattgtcaaggcatgcttctgatgangtctaccttggacagagggacaatccaaattggactgatgacacaaaggcaattcaagcctttaagaagtttggaaacaagctgaaggaaattgaggacaaaatctcagggaggaacaagaattcaagcctaggaaccgtaatggaccggcgcagatgccctacactgtgctcttccttaccagtggggaaggccttactttcagaggantcccaaca

SEQ ID NO: 984 - DNA, 280 bp, Glycine max
  Clone ID: 700554562H1
atcattcaccacatttcatttacacaaatcatcaatggcctctcttgtatcctcaagtgttcttttacacctctttctcataatttccgcgctccatttgggcgcagagcaagaattctgagtgaaaaggaccaacaacaacaattgcagttccaataccacaaaggccctcttctcagtggcaaaatctccgtcaatctcatctggtacggtaacttcaagccttcccagcgagccatcatctccgatttcatcacctccctttcatctcacaaatcca

SEQ ID NO: 985 - DNA, 276 bp, Glycine max
  Clone ID: 700554563H1
aacccttctggtaatggtatgtggggttctccaggatgtcctaaaccttctgaatatgtacaaggcctaataggtgttgttttacttgccttgaactcactaaaaaatgcaaagatgatgccaactgaggcaaatataactgattgcatccggtatggagatcccaagcaccgcaacactgatgttaagaaggctctgaaagtgctattgagcagaatatggtggtgaaacagatttaggtgctttgccgttgtatgttggtaagaagataaactt

SEQ ID NO: 986 - DNA, 284 bp, Glycine max
  Clone ID: 700554565H1
ggctcttcaggcatgggataaaagtgcatcactagtcaagttattttgatgtcatagcagggactagcacaggaggactcatgactgctatgctcactactcctcacccagacgaccccactcaccctctgtttactcccagcggaatcatagaattttataaaaaatacggtccttctatattcaatgaaactagtggttgggataatgcattcccgggtcccaagtacgacggcaagttcttacataataaagcacgtgagttgctgcaggatacgcgattg

SEQ ID NO: 987 - DNA, 269 bp, Glycine max
  unsure (1)..(269): unsure at all n locations; Clone ID: 700554566H1
ccgcaaccctggacactttgaagaaacttaatgaagctgaaaaggcgaagaaanaactagaacagcaagaatattttgatccaaagttggctgatgatgagagagaaaaaggaaatgaattcttcaagcagcagaagtatcctgatgctgtgaagcattacacagagtctatacgaagaaatgccaaaagatcctagggctatagtaacagagcagctgctacactaattgggggcatgcctgaaggttaaaggtgcagagaagtgcnt

SEQ ID NO: 988 - DNA, 275 bp, Glycine max
  unsure (1)..(275): unsure at all n locations; Clone ID: 700554567H1
ttcttctcttgcggctagggttttagcgcagtttcttctagatttaaggaagatgggtanggaaaaggttcacatnagtattgtggttatnggccatgttgactctgggaagtccactaccactggccacctgatctacaagcttggaggcattgacaagcgtgttattgagagatttgagaaggaagctgctgagatgaacaagaggtctttcaagtatgcctgggtgctgataagcttaaggctgagcgtgaaagaggaatcanattganntg

SEQ ID NO: 989 - DNA, 276 bp, Glycine max
  unsure (1)..(276): unsure at all n locations; Clone ID: 700554568H1
caaagcattgaattcaaaaacttaagttcattccttgtgttttgctttcttcctccaaaaccaaacatgtcgaacacatgcggcaactgcgactgcgctgacaagactagctgcaccaagnncaacagctatggtgttattgtagagactgagaagagttacatcgagactgttgtcatggatgttccagcagctgagcatgatgggaagtgcaagtgtggcactaactgcacttgcanggactgcacctgtggccataaggaatatgtagaaaag

SEQ ID NO: 990 - DNA, 275 bp, Glycine max
  Clone ID: 700554569H1
cccggtttgcgaatcaccgccattctcaagtttagaactccccaatccaaggcaacgctgcataactttggccaccaacacccccgtctctcatacattctacgaagtgaacgtcaatggcaagttgtgttggcacttcacctctatatttaccagttggtattggaaattttcctcatgctcatgttaagcttactagaccaaacattgttgggatgaaaccctaccatataacatcagaaaaggagaattaagattgctacatgcaaaatcca

SEQ ID NO: 991 - DNA, 280 bp, Glycine max
  unsure (1)..(280): unsure at all n locations; Clone ID: 700554570H1
ctccaccgtccattgcaaagtcttgcgcccaatttccatggaactgtaaagancaggatagttagaagattaaatccttaaagcagtaagtcatcatggataaatcagnnnnnnnnnnnnnnnnnnnnnnnnnnnnnnnnnntgtgatgggagttgccgcaggggctagccaaatggcctattcttctcactacccgactgcttccaggtggcttctggcacgcccgctgtaactgctccttccccaactcaggctccagctgccttctctagttctgct

SEQ ID NO: 992 - DNA, 261 bp, Glycine max
  Clone ID: 700554571H1
gtgccctcaaaattgagggggggcgcttgttgccatcacgacgacatttcctacgattctttttcactatattttctaaaggattctttttggttcgtgtaatttattatatactgtttatacctagactatgaactattttacttcagttttctttttgtaatgtatgatgaacctcaaagaaaggttcagagacgcagacaattcctgtactgtatgaactataaaaaaatgtttggaggtaaagaaattattttgtgc

SEQ ID NO: 993 - DNA, 281 bp, Glycine max
  unsure (1)..(281): unsure at all n locations; Clone ID: 700554573H1
ggaagaatcactcccttatccatttccacacaacataanagangaaancaacgntntctcttcagcntccattctangctctcccaacngnnagtctctgatccgaagagcgaaccataatggaagagtaaattacnggaaaccgaataaccgtttctccgtgaaagcctccgccaaagagattgtntttgaccagcattcccgctctgctatgcaggccggcattgacaagctcgcngacgctgttgggnnnagtnttgggcccagagggaggaatgttg

SEQ ID NO: 994 - DNA, 277 bp, Glycine max
  unsure (1)..(277): unsure at all n locations; Clone ID: 700554574H1
caacaatctctctggacatgttgaacctgtggtcccaaatgaccaacacagagctctttactcaacacactccatttaagatcttattcaaagagggaggctgtggaaccttcattccccttttcttcaatttgattacttcagtgaggcagtataatcaacacactnatatgcagacacaaaattatgtggatccttgcaggcatctcagactccagttgatgagatgatgagacagcgtatgttgatcctaatgatccaacaaaaatattctggc

SEQ ID NO: 995 - DNA, 279 bp, Glycine max
  unsure (1)..(279): unsure at all n locations; Clone ID: 700554576H1
gttactcaaaccgttcccaaacagaaaaacgaaaganagataaaattctcaaaaatggctgcgacttcgatccccatccgagtcgccggaatccaagcgtgcgccacctcgggccgccgaagggccgatcccgatcgccggagagcctcctccgccaactggtggaccccgctgttcggctggtcctccgagccggactacattgactccaacaacaaagcatcgagtcttcaaccggcaaagccggaaaccggttacggcggagaggagtcgaaagcg

SEQ ID NO: 996 - DNA, 276 bp, Glycine max
  unsure (1)..(276): unsure at all n locations; Clone ID: 700554577H1
ctgcgatggagtttcgcgtttccgtcatttggagccttctcctcattgtctctttattctctcctgaaatcaagggtgaggctctggttccgtcttcttcgtcgatagctccagtaatcaattccttcgcgctagatcatccaacgatgagcaaccttcaatgttgcttcaagaagttggtgctgctgtgtcagtcttgcttggttttgcacctccttccaccttttctgctgccagctcatccaanttgaatncaggttctaatcctaacccatt

SEQ ID NO: 997 - DNA, 253 bp, Glycine max
  unsure (1)..(253): unsure at all n locations; Clone ID: 700554578H1
gagggagagtgttgacgctccatcaagatgggtatttctagggattccatgcacaagaggcgtgccactggtggcaagaagaaggcatggagaaagaagagaaagtatgagcttgggcgtcaggccgcaaacaccaagttattcaagcaacaaaactatccggaggattacgtgttcgaggtggcaatgttaaatggagggcntgaggttggataccggcattactctggggttagtgaagcntttactcgca

SEQ ID NO: 998 - DNA, 275 bp, Glycine max
  unsure (1)..(275): unsure at all n locations; Clone ID: 700554579H1
atgtgcttctgttcgttttccaaatctcctctttgtttctgaatcttcccttcgctgttgcagagatggcttcgcggtgctggccttctgatgctgagctaaatgaattgagagagagagtttcgaaaatagtggatctgaataaagaggaagttcgagttgtggtatctccctatcgaatatgtcctttgggggcacacattgatcatcagggtgggaccgttgcagctatgacaatcaatnagggaatacttctggggtttgctcctctggca

SEQ ID NO: 999 - DNA, 279 bp, Glycine max
  unsure (1)..(279): unsure at all n locations; Clone ID: 700554580H1
cgaganatggcgatggcaatggcgcttcgcaggctttcatcttcaattgacaagcctctgcgccctctcttcaatgccggttccctctactacaagtcgtctttgcctgatgaagctgtttacgacaaggagcgacccggagtncacatggccgaagcaggtgaatgctaccacttgaggtcgtggattncgagattgctgatattattgagcttgagaaaaccnaggnntgaaaggggctaganttaccgncanagaanttcacacctcgtgtctgtg

SEQ ID NO: 1000 - DNA, 276 bp, Glycine max
  Clone ID: 700554581H1
ggcttcactgggtagaatttcaaaataaattctaccatactgatggctacaagttcaggcctttttcatttgcctccttaacagaggatgacgattgatccattcatatgtatggtttcatggcaactatatagaaaggatatttccacaagtgaagggagcataaaatgagaatttgtagtgtcggaaccaaatttggcggctatggttgttaggtttgcttgatgatattctgcttgatattgacctggcaacaaaaagttcctgctcatttcc

SEQ ID NO: 1001 - DNA, 274 bp, Glycine max
  unsure (1)..(274): unsure at all n locations; Clone ID: 700554582H1
ggtcccaattcctcatgctactgtgctttccaaaatggcttattctaaggatgagaacagatacaagaagcttctatgcagtgtggatcttacgaaggacttctttttcagctactcctacaangtnatgnttagtntntaatggnanttntctgtttggaanntnncttgggnnggatcactgttgancctttttgtttggaatgagttcttaactcgtggaatcaggaatagtctccagaatacttcctggactatagccttagtgtaggct

SEQ ID NO: 1002 - DNA, 276 bp, Glycine max
  Clone ID: 700554584H1
attttagaagaataccccctcttttgctgcatcagaggagttgtaaattaagagcatggctgcacaagctcttgtatcatcatcttctcttaccttctcagcggaggctgcaagacaaagtcttggaccaagatcactccaatctccatttggcttctccagaaaagcctcctttcttgttaaggcagctgctaccccccctgttcaagcaaggatcagacagacctttgtggtttgcatcaaagcaaagtctttcttacttggatggcagccttc

SEQ ID NO: 1003 - DNA, 275 bp, Glycine max
  unsure (1)..(275): unsure at all n locations; Clone ID: 700554585H1
caaagacacagagtgcgttcgttgacgacaaacacacacaaacacacaacaaaagcnctcnggaaaatctttctccggcgacctggaattccgacgaaggtagttgcggctccttcgtcccgaaactgaggccctcaaagtataaactttggtggtggtgggtaggatctggcggtgtatgatgggatcttaccatatgcccgttggagactccggcgaggttgctttggaccacaagcttcttccgtcataagcttatgaccttctaataatta

SEQ ID NO: 1004 - DNA, 274 bp, Glycine max
  Clone ID: 700554586H1
gtggtgcttagcttaccacaaagagaattttgcttatgagcactgggatgagatacttgacatctgcaaccagtatgatgtggctctatccattggtgatgggctaagacctggatccatctatgatgcaaatgacacagcacaatttgctgagctcttgacacaaggagaactgacccgtagagcatgggaaaaggatgttcaggtgatgaatgaagggacctgggacacatcccaatgcacaagattcctgaaaacatgcagaaacattaga

SEQ ID NO: 1005 - DNA, 278 bp, Glycine max
  unsure (1)..(278): unsure at all n locations; Clone ID: 700554587H1
gtggtgcttagcttaccacaaagagaattttgcttattcgcactgggatgagatacttgaacatctgcaaccagtatgatgtngctctatccattggtgatgggctaagacctggatccatctatgatgcaaatgacacagcacaattncctgagctcttgacacaaggagaactgacccgtagagcatgggaaaagggtgttcaggtgatgaatgaaggacctggganacattccaatgcncaagatttcctgaaaacatgcagaaacanttagant

SEQ ID NO: 1006 - DNA, 275 bp, Glycine max
  Clone ID: 700554588H1
ccttagtttcgaaagcatggcttccctggcggcttccaccgcggctatgtcagaaatccttggaaaccccgttaacctcagatgcgcaaccaggtctgctccatcaccaactacacctgccaccttcaagaccgtcgcacttttctccaagaagaagccagctccacctccaaagaaaaagcctgccgctgtatcccccgccaatgaggaactcgccaagtggtatggtcctgacagaaggatcttcttgcctgaggtctcttggacgatctgag

SEQ ID NO: 1007 - DNA, 265 bp, Glycine max
  unsure (1)..(265): unsure at all n locations; Clone ID: 700554591H1
tcttcgatgatgaactgttttcagttccagaaaccgtatcatcaccacgcgcagtacgtgaagatggaggagcacaatttcctcagcgcggatgaggcctgcaatttcttctcngatgaacaagcaccgacccttcaatggtactgtccagaacagtggagctgagaaaagaaacatggaaattaaaccgcttttagaaatttttgtttgaaggtagaaaatgaaatactgtgcaaaagaaaaagagagaacaganatcaatggc

SEQ ID NO: 1008 - DNA, 261 bp, Glycine max
  unsure (1)..(261): unsure at all n locations; Clone ID: 700554592H1
tcttcgatgatgaactgttttcagttccagaaaccgtattcatcaccacgcgcagtaacgtgannnatggaggagcacaatttcctcagcgcggatgaggcctgnngtttcttctcggatgaacaagcaccgaccctcaatggtactgtccagaacagtggagctgagaaaagaaacatggaaattaaaccgntttagnatttttgtttgaaggtaganatgcaatangtgcaaaagaaaaagagagaacggnttcatggc

SEQ ID NO: 1009 - DNA, 271 bp, Glycine max
  unsure (1)..(271): unsure at all n locations; Clone ID: 700554595H1
ttcttctcttgcggctagggttttagcgcanttcttctagatttaaggaagatgggtaaggaaaaggttcacatcagtattgtggtcattggccatgtcgactctgggaaatccactaccactggtcacctgatttacaagcttggaggcattgacaagcgtgttattgagaggtttgagaaggaagctgctgagatgaacaagaggtcttcaagtatgcctgggtgctggacaaacttaaggctgagcgtggaaagaggaatcaccntga

SEQ ID NO: 1010 - DNA, 111 bp, Glycine max
  unsure (1)..(111): unsure at all n locations; Clone ID: 700554596H1
gtttgngngnntgaaatatttcaattaaaggaactccaaatggggaggaaagggggttggttttctggcagtgaagagagttttngtttctgatnccaaaaaggaacagaa

SEQ ID NO: 1011 - DNA, 287 bp, Glycine max
  Clone ID: 700554601H1
tgaagttgtttgttttctttgttgctgcagtagttttggtagcatggccatgccatggcgcaggctaccaaaggttccctctccgaatgaaaactggctatggtgagcgttcttcggaggtaaaatgcgcaagttttaggcttgctgtggaagcacacaacatccgagccgttaaaaccattcctgaagagtgcgttgaaccaacaaaggactacattaatggcgaacaatttagatcagactctaaaacagttaaccaacaagctttcttttatgctagtgaacgc

SEQ ID NO: 1012 - DNA, 123 bp, Glycine max
  unsure (1)..(123): unsure at all n locations; Clone ID: 700554603H1
cgcgagctcttgcntctncaaggatcccttacaaacacaaggttcccatccaaggcctctacactactttcccaacccaatgcgccttaaagagacttgaggtgacagaattctctgggctta

SEQ ID NO: 1013 - DNA, 277 bp, Glycine max
  Clone ID: 700554604H1
tgaggccaaatatttaatgttgttgccaaccccagaatgattgttagagttgcagacgtgcaaagagtacgataaggatttgattttcgatcaatttgaaagaacttatccatttcttgcaattttagttgtgtacccataactccatgcatgcaactcgttgagctatctcaataaatgccgtttgtatgtgttagtatttatatttatatacctttcggcagtttcgctgctattgttgtggactatgtgttcctgtaatccaataataagaaag

SEQ ID NO: 1014 - DNA, 283 bp, Glycine max
  Clone ID: 700554607H1
cttgaatcttcgttatccttctttttttctccttgaactcgaatattcactatggcagatgaggtggttctgctagatttctggccaagtccatttgggatgagggtcaggattgcacttgctgaaaagggtatcaaatatgagtccaaagaagaggacttgcagaacaagagccctttgctcctcaaaatgaacccggttcacaagaaaatcccggttctcatccacaatggcaaacccatttgtgaatctctcgttgctgttcagtacatcgaggaggtct

SEQ ID NO: 1015 - DNA, 282 bp, Glycine max
  unsure (1)..(282): unsure at all n locations; Clone ID: 700554608H1
caaccattgggaaaaaccgatttggaaagcggttctcgcccgctgtatccgatgatgcttgagagccccgaactgcgctggtctttcatcagaaaagtatactccataatcgccatacagttgctcgtaaccatcgtcgtcngcgccgtcgtcgtcaccgtccgcccaatcagcgtcttcttcgccaccaccggcgccggattggctctctacatcgtcctcatctttgtccccttcatcacattgtgtccactttactactactcccagaagcatcccgtc

SEQ ID NO: 1016 - DNA, 101 bp, Glycine max
  Clone ID: 700554610H1
gcaaagttacaaattttgagtgctaaatgaagcatatttggattcggatgtccaacatttgaattccgattaatgttgaatagtgttagaaccacaaaaat

SEQ ID NO: 1017 - DNA, 282 bp, Glycine max
  Clone ID: 700554611H1
gttagaagaggttgcataactgaacaaacaaagcaaccctatgtcgaaggtggtttgtgtcaccggagccagtggcgccattggatcatgggtggccctcctcctcctccagcgtggttatacggtccatgccaccgtccaagacatcaaggatgaaaatgagacgaaacatttggaggaaatggaaggagcaaagagtcgtctccatttttttgaaatggatcttcttgacatcgactccatgccgctgccataaaggttgctccggcgtaatccacctcg

SEQ ID NO: 1018 - DNA, 133 bp, Glycine max
  unsure (1)..(133): unsure at all n locations; Clone ID: 700554612H1
cgcaaattgtggagaacatagaangacgcaccctccccagatgcctctncttctccagagagtcctgagagtgatggtgcgcagaaagatcttcagtgcacaagaatcagagacaggagaaaccctcttcggc

SEQ ID NO: 1019 - DNA, 122 bp, Glycine max
  unsure (1)..(122): unsure at all n locations; Clone ID: 700554614H1
cactggacactagaagtagcagtcactaagttttgtgcataaccttaanaccatgtacattggccctancccanctactagtggtccactncatcctatttncctactgacacttaacattg

SEQ ID NO: 1020 - DNA, 276 bp, Glycine max
  Clone ID: 700554615H1
tgcattgcatgttttgagcaaagtgggccatattatgaccccaaagattctagctcttttaggaatataagctgtcatgatccccggtgccaattggtttcagcccccgatccacctaagccttgcaaggctgagaatcagagttgtccatacttttattggtatggtgatggttccaacacaactggggatttgcattggaaacttcactgttaatctcaccactcctaatgggacttccgagttgaagcagtggagaagtgagtttggagtggt

SEQ ID NO: 1021 - DNA, 116 bp, Glycine max
  unsure (1)..(116): unsure at all n locations; Clone ID: 700554616H1
aaagcgcgtgagataagcagaaatngcggcggctacggcgatttcttcagctaggctgtttttccgccgtccaccgcagctncacacctccggcgccgctcgtttctgttcccttc

SEQ ID NO: 1022 - DNA, 286 bp, Glycine max
  Clone ID: 700554617H1
ttctacctctgtcatcgtcccacgtggcagctgagttgagatatcaagcagaagaagcactctggttctgaggcgcaacctcgtcccaacaaccatggcggtccctgctacatcctcagcccctgtccttcgacccatccgcaccaatcactccttctcttcccctttccgctctctcccctctcccgccgccagaaaacccctaaccgtcttcgccatggcccccaaaaagaaggtgaacaagtacaatgataagtggaagaaggagtggtttggagcggggata

SEQ ID NO: 1023 - DNA, 282 bp, Glycine max
  Clone ID: 700554618H1
cttgtggagaagcttgcaaattttgatagggaacgtatcccagaacgtgttgtccatgccaggggcgctagtgcaaagggtttctttgaggtcacccatgacatttctcacctgacatgtgcagatttccttcgagcccctggagttcagacgcctgtaattgttcgtttctcaactgtcatcatgagcgtggtagccctgaaaccttgagggaccctcgaggttttgccgtgaagttttacaccagagagggtaactttgaccttgttggaaacaaccttc

SEQ ID NO: 1024 - DNA, 280 bp, Glycine max
  Clone ID: 700554619H1
atgcagagaaatgagaattgggcattggctcagtccttctgaggcaggtggcgctgccaaacgcagaacctccggcagaaattgccaccgcaaacacgtggaagacgggtagtagtactccatctcccattctctcatattccctttactaattaaagatcatgaacagcgagagacagtcgacgacgacgacgttgctgcacggcaagtacgagctaggtcgtgtgctggggcacggaagcttcgccaaggtctaccacgcgcggaacctgaagacggg

SEQ ID NO: 1025 - DNA, 115 bp, Glycine max
  unsure (1)..(115): unsure at all n locations; Clone ID: 700554620H1
taaacanatgcaatctgaagangctgggtttgaagccagacatcattgacctcgaataccagtnccngttggnnangtgccacanggaaccctggtgggagcagttcacaattgg

SEQ ID NO: 1026 - DNA, 278 bp, Glycine max
  unsure (1)..(278): unsure at all n locations; Clone ID: 700554623H1
tgaatataatgcatctggtggttggtcacgataatattaaaaaatatgcattctgagatttttaaaacatgatatattggtggtggaattagcagcagagagtttttctgatatgctacattcttaatctggtaggcaagtaatttacgagtgatgctttgggaatggttgatgatccacgtgttgtgctcatcaagctgcagatcgtacttcacaacatgagaannnttatgctctgccattgcaaaaagctcaagctgttgcagaggagacnntaa

SEQ ID NO: 1027 - DNA, 279 bp, Glycine max
  unsure (1)..(279): unsure at all n locations; Clone ID: 700554624H1
actggatgtcctaatgctttatgctttctttcttcaactgactaatatctcctttgaggcatatgataatatgaatagttgagtcgagaagaagatttttcttctttttttgggagaataagaaaaactgttaaaaatattttccataaaagaaaaaaaaaacacttgaagtggttattttgtgcataaatatgatagtttaacaatncacttgactcattgttgtttatttggtaaatactttttnnaagttttactttttgttcccattggtggggt

SEQ ID NO: 1028 - DNA, 278 bp, Glycine max
  unsure (1)..(278): unsure at all n locations; Clone ID: 700554625H1
ataagtaatgtagtatagtctgaattatatcatatgtatttcagtaaacttaatagtatgacaacgcattcatttcctatgcattgattcgatttctgatactatcggagtgaaaaaagtagatctaaagaaaaacgcgggttggattatattagtaacaagtaaattctttgtacgtaaaaagttccaagattttgttggacagaataacaattgcnaagtttgagatcacccagaaagcattatcaattttaaaagcctactcgggtattgagcgt

SEQ ID NO: 1029 - DNA, 277 bp, Glycine max
  Clone ID: 700554626H1
ctatagataaataatgaagatgatcccttcttcagaatccctgctttccttttttgacttagatacttcttatgcaactatagtgaggctaagagttggtgcataattaatcaaaatgttggccatattccacaaagcttttgctcatccacctgaagagctgaacagtcctgcatcttacaaaggttccaagaagcctaaggttcctgaggaaactctcaaagattcctttcccaccatcctcacaacacttgctccagagctttggtgaagctgc

SEQ ID NO: 1030 - DNA, 87 bp, Glycine max
  Clone ID: 700554627H1
gttgagttatttctgtacagtagagaagtatatgtatcagattatatcggtggcttttaaacatgtaacctttccttttctaaaaaa

SEQ ID NO: 1031 - DNA, 277 bp, Glycine max
  Clone ID: 700554628H1
gcagagagaagagaagggctacacaaacacaatctctaatggcactcaggatgtgggcttcttccactgccaatgcactcaaactctcttctgtctccagacctcatctcttgcctcctttttctttctccagatgcttatcttccgtcttggatggacttaagtacgctgattcacatgaatgggtcaagcacgaaggctcagtcgccaccattggtatcactgaccatgcccaggaccatcttggagaggttgtgtatgtggagctgccagaacc

SEQ ID NO: 1032 - DNA, 278 bp, Glycine max
  Clone ID: 700554631H1
ctttggtggccacagcaacaataacaatggcagcctcactacaagctgcagctaccttcatgcaacccaccaaggtgggcatggccactcgcaacctcaaatctacacaatgcatttctaaggcttttggcttggaacccgctgcagctaaactcatttgctcccttaagcccgatctcaaagattttgctcaaaaatgtgtcgacgccaccaaaattgcaggattcgcccttgccacctcagctctcgttgtttcgggagcgagtgcagaggtgtcc

SEQ ID NO: 1033 - DNA, 285 bp, Glycine max
  unsure (1)..(285): unsure at all n locations; Clone ID: 700554632H1
gcagagagaagagaagggctacacaaacacaatctctaatggcactcaggatgtgggcttcttccactgccaatgcactcaaactctcttctgtctccagacctcatctcttgcctcctttttctttctccagatgcttatcttccgtcttggatggacttaagtacgctgattcacatgaatgggtcaagcacgaaggctncagtcgccaccattggtatcactggaccatgcccagggaccatcttggagaggttgtgtatgtggagctgccagaaccagtgg

SEQ ID NO: 1034 - DNA, 278 bp, Glycine max
  unsure (1)..(278): unsure at all n locations; Clone ID: 700554633H1
cttgtggagaagcttgcaaattttgatagggaacgtatcccagaacgtgttgtccatgccaggggcgctagtgcaaagggtttctttgaggtcacccatgacatttctcacctgacatgtgcagatttccttcgagcccctggagttcagacgcctgtaattgntcgtttctcaactgtcattcatgagcgtggtagccctgaaaccttgagggaccctcgaggttttgccgtgaagttttacaccagagagggtaatttgaccttgttggaaacaac

SEQ ID NO: 1035 - DNA, 278 bp, Glycine max
  unsure (1)..(278): unsure at all n locations; Clone ID: 700554634H1
aacgatccaaactcttttttcatttgcagcatcaaaatgagtggtagcaacgatggnagcggcagtggagctctaggtttttgaaggtggctagtgcagctgccgctacagccgccgttgccggcggtttatatgccattctttcatcctcaacctctgctagctctgagatggaagtgccgtttggcagcgcacggcgtgagagcaaagaacgtgacgatggtggctccgggtctcatcctcgcgagggtgccaccacggtcagtcgttggaagaaa

SEQ ID NO: 1036 - DNA, 275 bp, Glycine max
  Clone ID: 700554635H1
gtcaaatctccgagaatacgtactcctcattatcttcctggtttgcataatgaaggaacaaggaagagacagagggcagctatggtagattatacttggtctgttggggatagggttgatgcatgcagtgaagaaagttggcaggaaggagttattacagatcagaacaagaaagataaaacattaactgttcacttccctgtcagtggaaaaacaaaacttgtcagagctggcatctacgtccatcccgtttttggaaggatgggaaatggatt

SEQ ID NO: 1037 - DNA, 275 bp, Glycine max
  unsure (1)..(275): unsure at all n locations; Clone ID: 700554638H1
tacaaaggttataaggctgttttggattcaaaatccattgatgaaacactggcattgcatgcaagttgggagccaaggcattcgaggtactgtcataggtttccatggcagcagtatgtaaaagtcggagctgttcttcgtcaatttggttatactgtggtagctttacatggntgtttgagaacagaaattcagacacctagatcagttagagccatgttcaaggacccctgcattcggctggcagcagaggtatccaaagtactgatagaact

SEQ ID NO: 1038 - DNA, 111 bp, Glycine max
  unsure (1)..(111): unsure at all n locations; Clone ID: 700554640H1
gnagaaagantggcagcttgcactgtctactcaacacaatctctgagcncaaattgctccatctcaaccccatcaaagacgcaactacagttttttccaccaaaagcaggt

SEQ ID NO: 1039 - DNA, 135 bp, Glycine max
  unsure (1)..(135): unsure at all n locations; Clone ID: 700554641H1
ctggggccacgagtatgttaggnatctagctggagaaattgctcnggaatacacaaaacgacagagtgaagaggcccccatagatgatctcatggaacttgtgcaacaaattgttgcttttcacatgaagcataa

SEQ ID NO: 1040 - DNA, 278 bp, Glycine max
  unsure (1)..(278): unsure at all n locations; Clone ID: 700554642H1
ggctatacgangntctctcataacttccttcatattttatttgtccaatcttccaggaagttatganagatccacatgtagctgcagatggttttacatatgaagctgaggctatacgaggatggcttgatggtggtcatgacaattcgcccaatgactaacagtaagcttgcacatcacaatcttgttcccaaccgcgctcttcgcttctgcaatccagggactggcttcaaaaccactgatcaagctcattattttctctgcccatttgattgaac

SEQ ID NO: 1041 - DNA, 228 bp, Glycine max
  unsure (1)..(228): unsure at all n locations; Clone ID: 700554643H1
gacaaattctactttctctgattccatttccaccatcatcaccatgncccaattctgaacacaacatcatcnctggaaatgctggctatgtccttgaagatgtccctcatctatctaactacatccctcacctcactacatatcgtaatccattgcaagacaatccttcctattcagttgttgaggagcattctgttgatgtggatgatactattgcgcaaaaggcaa

SEQ ID NO: 1042 - DNA, 271 bp, Glycine max
  Clone ID: 700554644H1
tgtcaattgatcaggtggcaagtgcagtccaagattgtaattcaccaattgatgctgagttgacgtttaagcagagtgacccatctaaggagcagcaaggatgtatgttaaaggatacaagtatttcaaagtatacctcttgtcatgatgacttgttaagtaaagggcaagagtctgcagctgttaccaacatacagcctcaggttctcactcatcttcagatttgaaattggagtctctaagttagaaaagcagagacaaatacaagttc

SEQ ID NO: 1043 - DNA, 180 bp, Glycine max
  unsure (1)..(180): unsure at all n locations; Clone ID: 700554645H1
ggcaaattatcgtgtttnttccccttacntttaataattattacattgcatcagcattctcnttgnggtttcaggcngagagaancanatggagcgcgctatttccganttttcggaggagcangggagccggtncctccnngttcgcaatctccctccangaancgaacacaattgnng

SEQ ID NO: 1044 - DNA, 190 bp, Glycine max
  unsure (1)..(190): unsure at all n locations; Clone ID: 700554646H1
gtgaaactgttgttgaagtgcctaatgtcagctgggaagacattggaggccttgaaaatgtcaagcgtgaactgcaagagactgtacaatatccagttgagcncccagaaaagtttgagaagtttggtatgtctccatctaaaggagtacttttctatggtcctccaggatgtgggaaaactttgttagc

SEQ ID NO: 1045 - DNA, 276 bp, Glycine max
  unsure (1)..(276): unsure at all n locations; Clone ID: 700554647H1
ctccttcgcaaatgccagtatcatgttactacaactaatcaggcagttgaggcactgaccaatgttganggnaaacaganataagtttgacctcgttatcagcgatgtgaatatgcctgacattgatggatttaagctccttgagttggtgggacttgaaatggacctacctgtcatcatgtggtcagcacacggtgatacaaagctggtgatgaagggtgttncacanggtgcatgtagactatttgctggaaactgttcgaattgnagagtgga

SEQ ID NO: 1046 - DNA, 278 bp, Glycine max
  unsure (1)..(278): unsure at all n locations; Clone ID: 700554649H1
ctctactcattgatcganattcgaatgatcgctttctctgatctaaactaactgtgactgaaccggaaaatcaaccacccccaccatcattttcattctcattctcctctctctgttttntctatttcctttctttcttatcgctccccatttacttgttttttcatttttgcagggtttcttttgctcatcaccaccttcttcatattccctctccaaccatggacgtgggatcgtggagttcttctccctccaagatcaagtcccgattctccttc

SEQ ID NO: 1047 - DNA, 277 bp, Glycine max
  Clone ID: 700554650H1
aacacaaagcacaaagcaaagctcatccttgagttaaaaaatggcagcagcttcttccatggctctctcataccccatccttggctggcaaggccgtgaagctgggcccatcagccccagaagtgggaagggtgagcatgaggaagaccgtcaccaagcaggtctcctcaggaagcccatggtacggcccagaccgagtcaagtacttgggcccattctctggcgagcccccgtcctacctaaccggtgagttcccaggcgataaggctgggacatg

SEQ ID NO: 1048 - DNA, 275 bp, Glycine max
  Clone ID: 700554651H1
caaaacactcataacacaaagcacaaagcaaagctcatccttgagttaaaaaatggcagcagcttcttccatggctctctcatccccatccttggctggcaaggccgtgaagctgggcccatcagccccagaagtgggaagggtgagcatgaggaagaccgtcaccaagcaggtctcctcaggaagcccatggtacggcccagaccgagttcaagtattgggcccattctctggcgagcccccgtccttacctaaccggtgagttcccaggcgat

SEQ ID NO: 1049 - DNA, 275 bp, Glycine max
  Clone ID: 700554652H1
tttctctcttctctctccacccaaaccctaactcccgaccctgttcccctctcgtatccgtcatgaaaggaggaaagtccaagaccgaatctaagagagccgatcccaaacttgctgtgaataagaagggagccgccaccaaggctaggaaacccgccggcaaggggaaggcagcgaaagaccctaacaagccaaagaggcctccaagtgctttcttcgttttcatggaggagttcaggaaggtattcaacaaagaacatcctgaaaacaaagca

SEQ ID NO: 1050 - DNA, 264 bp, Glycine max
  unsure (1)..(264): unsure at all n locations; Clone ID: 700554653H1
tgccaaagctgttgaagcggaaaaggtcagttatgacaatgacatggatggtagcaatggaaggaggaacttgatgttcgccgcggcggcggggcctgctgtttgctctgttgctgggatggcagtggcagatgagccaaaaccaggaaccccatcagccaagaaaaagtatgctccgatttgtgtcaccatgccaactgctaggatttgtcgcaattgagggactcggtnnttatnttacttctgatgatcggaaatgtgcat

SEQ ID NO: 1051 - DNA, 273 bp, Glycine max
  unsure (1)..(273): unsure at all n locations; Clone ID: 700554654H1
gttacagtgaagagattcatatgccattatccaactttcatatttcatttttgttttgaaattaaaggttcataatgacaaccacaccatgtttggttttgtagttatgctagcttgatgatttacccaagtgtgttgtatgttgatattgatattggttccctcaagactattattgtctgtctggattatgtttttagtcataatttgttttgtcactattatggcaaatgaaatataagtgataaatgttgttttgcctgtagatttnnc

SEQ ID NO: 1052 - DNA, 183 bp, Glycine max
  unsure (1)..(183): unsure at all n locations; Clone ID: 700554655H1
ttcganagantttatccaattganattttaaaaatgactgggataaacttaaganttccaattattgaaattgaataagtaaacaatttaattggattggtcgaatggtatcaaaaaaatggagtactaactcccatttctatttattattgaattaaccgatcaacttgctttgttatcgaa

SEQ ID NO: 1053 - DNA, 272 bp, Glycine max
  Clone ID: 700554656H1
tcgatcaattaatttccaatggccgatcagctcaccgacgaacagatctctgagttcaaggaagcctttagcctcttcgacaaggacggcgatggttgtattaccaccaaggaacttgggactgtgatgcggtcgcttgggcagaacccaactgaggctgagctgcaggacatgataaatgaggttgatgctgatgggaatggtaccatgatttcccagaattcctcaatctcatggcgcgcaagatgaaagacatgattcagaggaagagc

SEQ ID NO: 1054 - DNA, 278 bp, Glycine max
  Clone ID: 700554657H1
ggaagaggagagcatggcagagattcagattctaaacctcggaggcccgccaagcttaagtacgaggaaactgccatgccattcgcattcccaaaactggacttgtttgcagcacaagctcaagtgcaacggacagattcctttgccttttctccaacaaagaaagggaggaacaagctagaaaagcattagaaggtgcactaagtgggaagaaaaatgaatttgacaagtggaacaaggaaattaaaagaaaagaagagctgggaggtggaggtgac

SEQ ID NO: 1055 - DNA, 276 bp, Glycine max
  Clone ID: 700554658H1
gacacttgaaataatgccaagtatactaaatgtcttagtcttaagaggggggaaaaactggaattccaatgattcttaatttcttacaatccaatctgcaaactgagtgagatatataacttgtttttgatttcttcctcatcattttgcatatacaaagattaaaatggaagggttttttggaaattgcttcaatatgattttgctgatgttgtgcttcaccaacttgagcatagcttttgctcaaagtcatatgaatggatttggagagcagcc

SEQ ID NO: 1056 - DNA, 273 bp, Glycine max
  unsure (1)..(273): unsure at all n locations; Clone ID: 700554659H1
attattggaaggtacctatataaaagcatgggcagtagtgacatggacaaaaccccgaaagaggagtctaagacacctccagctacgtcacaggagcagtcatcaacaactggcatgccaacaactaatcctgactggtctaactttcagacgtattctcctatacctccacatgggttcttggcatcaagcccccaagcccacccatatatgtggggcgtccagcatattatgcctccctatggcatccaccttcatccctatgttgcangt

SEQ ID NO: 1057 - DNA, 271 bp, Glycine max
  Clone ID: 700554660H1
tgatgatgtatctaagcagcagtatcattgcagtggctgtggaatttgcagaactggaggatgtgaaaatttcttccactgccacaaatgtggttgttgctactcaactcagctgaaaaacagccacccttgcgtggaaggagcaatgcatcatgattgccccatttgctttgagtatttgtttgaatctgtgaatgatgtcactgttctgctctgtggacatacaatacataagagctgcctaaaggaaatgagggaacattccatagca

SEQ ID NO: 1058 - DNA, 276 bp, Glycine max
  unsure (1)..(276): unsure at all n locations; Clone ID: 700554661H1
gttttctgttctctgagaaggtaaaangcgttaaaacgcagcatctcaaacacgcgattccgaagcttttnctgcgatccaatggagttcgacccgatcccaatcggttcgtgctccaaagaacaccagatgatctataaggagtggttcaattacgctgattcagatagcgatggccgcattacggggagtgatgccaccaagtttttncgccatgtnccatttgtcccgcgaagatcttaagcagtgtgggctattgcagtttcaaagcgacaa

SEQ ID NO: 1059 - DNA, 169 bp, Glycine max
  Clone ID: 700554662H1
aatgttcaaaaatattgttgatttcttttgttctatatccaatctccctggagtctttaaaaccaaggctttaacttgtatcgtgccattgataattaattaaatattgaggagtacatgaagtatatcgagaagtttgaactattaagtatgtccaaagcattttgag

SEQ ID NO: 1060 - DNA, 149 bp, Glycine max
  Clone ID: 700554663H1
cactcataacacaaagcacaaagcaaagctcatccttgagttaaaaaatggcagcagcttcttccatggctctctcatccccatccttggctggcaaggccgtgaagctgggcccatcagccccagaagtgggaagggtgagcatgagg

SEQ ID NO: 1061 - DNA, 278 bp, Glycine max
  Clone ID: 700554664H1
taaggagaaaaatgccattctgttcacttatcctcctgttggatcctttactagtaccggtttggtggtttcctccaaattgcctaggttttctgacatgtacacactcactatagcaagcgcagatccaaaatcaatttctgcaaatgatcaagtacatttcaccaaaagtgtcactcagtggttcactaaggacggagtcttagttgagggcctgttctggaaggatgttgaagcttgatagttcaatatacttaaagaaccaaagaagagcagta

SEQ ID NO: 1062 - DNA, 275 bp, Glycine max
  unsure (1)..(275): unsure at all n locations; Clone ID: 700554665H1
tcaaaatggctgtttcggctatcacaggagcgaggctaaccctagggatagggttggcgatacctctttcctctcccacgcgctctcgaaccntcgcaatggccgtatccgtcgaccccaagaccgacaacaaactcactcttaccaagtccgaggaagctttcgctgctgccaaggagctgatgcctggaggtgtcaactccccagttcgtgccttcaaatccgtgggtggtcaaccaattgtgattgattcagtcaaagggtctcgtatgtgg

SEQ ID NO: 1063 - DNA, 278 bp, Glycine max
  Clone ID: 700554666H1
ggctgctttggactctaaggttttaagagaaaaagatgaggagcttcatcagctaaaggatcagttcgaacttgccctaggtgaagcaagcaaaaaccagaccgtcattgttgatttatcccaagaaagagatgatttgaaggaggctctagagaatgaatctagcaaggtgaatcatttgaagcatgaactccaagtcacccaagagaatcttggcaaaatcaagaaatgagtttgctgaattggaaaactttctaactgagtcaattaaactgcgc

SEQ ID NO: 1064 - DNA, 268 bp, Glycine max
  unsure (1)..(268): unsure at all n locations; Clone ID: 700554668H1
aaagcgcgtgaganaagcagaaatggcggcggctacggcgatttcctcagctaggctgtttttccgccgtccaccgcagctcacacctccggcgccgctcgtttctgttcccttcccctgcgctaccaagttatcggttgttatgagtctggagaggcatgacacggatactgctgggtctgataccaaaaatacactaanttatgcagttgatgtgtcaaagctacatgttgaagaaaagaagaactcatattcaacaaaagatggc

SEQ ID NO: 1065 - DNA, 117 bp, Glycine max
  unsure (1)..(117): unsure at all n locations; Clone ID: 700554669H1
aacacaatccccttccctcttctctttctatccaaattctccaccagccatggcagtttcttcagcaacagcttcctccaaactncatactantcgcccatgcatcatcatcctcnt

SEQ ID NO: 1066 - DNA, 273 bp, Glycine max
  Clone ID: 700554670H1
ccaaaacagcagagagaagagaaggtgtagacaaacacaatctctaatggcactcaggatgtgggcttcttccactgccaatgcactcaaagtctcttctacctccagacctcatctcttgcatcctttttctttctccagatgcttgtcttccgtcttggatggacttaagtatgcagattcacacgaatgggtcaagcacgaaggctcagtcgccaccattggtatcactgaccatgcccaggaccatcttggagaggttgtgtatgtgga

SEQ ID NO: 1067 - DNA, 264 bp, Glycine max
  unsure (1)..(264): unsure at all n locations; Clone ID: 700554671H1
gcaaaaaaagagattaggatttggtgttgcgcagccgcaggagatatggccatggctttggtgagcctcagcaccattctcacaccgcnnnnnnnnnnnnnnnnnnnnnnnnnnnnnccaaaaccttcttcttcctccatcgttcggtttcgccctctcactccccttcctcgctttcggaggcacctcgttcgtatggctcccgatgaggagaagatgactcgtcgctcccctctcgattccccatcgagtgggaaaggccta

SEQ ID NO: 1068 - DNA, 274 bp, Glycine max
  unsure (1)..(274): unsure at all n locations; Clone ID: 700554672H1
cttggttangaaacctctcaaagtttgccaccaagagagcatcatcatctcaaagacccaaaaacactgacccattttgtcttttaccctccttcacttttctctcccacttcagcagcaccaacaccattgaggagaaaccttgtgtggagcctgttgagtacaattattcgggcttggagccaacaaggccccatgagaagccacgtgtggtggtgctgggttctggttgggccgggtgcaggctcatgaagggcttggaccctcgtgtgta

SEQ ID NO: 1069 - DNA, 273 bp, Glycine max
  Clone ID: 700554673H1
gtaggaggtagaaagaagaaagggaggaaccagtcccgctgattagtctgctgtttctagctccattctatagtaatggccaagtctgttgctaatcctcctttccttcgtcctctgcatcaactagaatttctgagatgccctcgcctttcttctaaatctcagtttcaccctcgccgcttccgttctcaaacccaaagcatcattcgtgctatatccgcagttgccgcagaatcggagttaggtacacagcaggatcaagcaatgaagcag

SEQ ID NO: 1070 - DNA, 130 bp, Glycine max
  unsure (1)..(130): unsure at all n locations; Clone ID: 700554674H1
gctaggtgatgtaaaggaagagaagattaaggcagaagcggaactgaagcataaatcagttgaganagagcatacaaaaagtaaggtagagaagattaaggtagaagcggaactgaagaataaatcagtt

SEQ ID NO: 1071 - DNA, 240 bp, Glycine max
  unsure (1)..(240): unsure at all n locations; Clone ID: 700554675H1
ctgggatttagctgcaagacggacagtttgtcagtttcctggtcaccgaggtgctgtacgaggcttgacagcatctacagatggacgcattcttgtgtcatgtggaactgattgcactatcagactctggagtgttcctattactactctatggagtcagatgactcaactangagcactgttgagccagcaagtgtttatgtttggaagaatgcattttggggtgctgatcaccatggg

SEQ ID NO: 1072 - DNA, 271 bp, Glycine max
  Clone ID: 700554676H1
gggatgaacctggaggacatcactctcaactggtattttggcaacaacaggtcaatgctagtctcaaattgtctcttcagaatgggtggagctgcagttctactctccaacaagtcttctgatcgcagaagagccaaataccaactgatccatacagtgcgtactcacaagggtgcagatgacagatcatatggttgtgtcttccaagaagaagatgagaagaaaacaattggtgtggcatctcaaaggacttaatggctgttgcaggaga

SEQ ID NO: 1073 - DNA, 271 bp, Glycine max
  unsure (1)..(271): unsure at all n locations; Clone ID: 700554677H1
ccctttcntcttctattgattactacttattttcaagggatcaatacaatataatggttcanacatgctaacggtgtatgctcccagagcagttctaaagtgccatttacaccaggattcagcttcttctcaacaaccatattcatatccatgcaagatcaataataatgttcatttggtgaattgtaatcctaaaccttttgggcactccttgtactaatatatcgtttcatagttcctccttctctggggaatgtggtaagctacnnnc

SEQ ID NO: 1074 - DNA, 270 bp, Glycine max
  Clone ID: 700554678H1
ttatcaatcggccacacagaaatgggcagtgcttctctgattccagtttcctggttgccttggcggccactttctcctttcaagggaacggtgaaaaccttggtcgcaaaaccatggctgaagaagattcagcaagcaagacccctcatttccgtggttaacaaggctgcctctctatcttcccccgtggacagcacccagcgtcggcgttcggtttcggctggacaatttggggccgcaacgggttcgaggaagaggctaagagaaagg

SEQ ID NO: 1075 - DNA, 275 bp, Glycine max
  unsure (1)..(275): unsure at all n locations; Clone ID: 700554680H1
atgaatgctcaggtgggactcacaagcccgggttggataggagcagatngttgccatctcaattntccacaagacattttgcatccctcatggaggaggtggccctggcatgggacctattggtgtaaagaaacacttggcaccatttttaccttcacacgtgtgatagaaactggtggaattcctgcccctgacaaacctcaaccacttggtaccatcgctgctgcaccaggggcttcagcactcatatgccaatctcttaacatttacatagc

SEQ ID NO: 1076 - DNA, 194 bp, Glycine max
  unsure (1)..(194): unsure at all n locations; Clone ID: 700554682H1
agaattcgaagagaaatcaaatcgaatctcatttgatctgtgtgtggttgcngcggcggcaatggcggagcacttggcatcgatattcgggacggagaaggacagggtgaactgcccgttctacttcaagatcggcgcgtgcaggcacggcgaccggtgctcgcgtctccacacgaagccgagcataagcccca

SEQ ID NO: 1077 - DNA, 224 bp, Glycine max
  unsure (1)..(224): unsure at all n locations; Clone ID: 700554683H1
acaacaatgactttcgnagagaagacaatttatcaaacctctttagcctcaattcccaactacacccttctagagtgtgtcttggggctatgcttcaaagtgataaccatcctccttcagcttccttatgagtacatagacaacaatccaattcccaccatagtcttcaagggtcgcccaagaaccttccatgccttcataacatgcataatcttcgccttctc

SEQ ID NO: 1078 - DNA, 87 bp, Glycine max
  unsure (1)..(87): unsure at all n locations; Clone ID: 700554684H1
ctctttctcccttcaaatccgtcacttcccgtcaccgtcaccgtcactgtcancggtcattnctcttccattgattctccganaatg

SEQ ID NO: 1079 - DNA, 142 bp, Glycine max
  unsure (1)..(142): unsure at all n locations; Clone ID: 700554685H1
attagtcgttgccattctcatgcctgccttctgtactctatgcnactaccantcagtgntcatgnntccttacaagctaccggaccattccagcgcctttcaattgctccnttntggnctacaaattactggtgacncctgt

SEQ ID NO: 1080 - DNA, 271 bp, Glycine max
  unsure (1)..(271): unsure at all n locations; Clone ID: 700554687H1
gttgcccatcaccgtttatcctatcccagcaagaaccatgcactgcattttctgacaaattcaaccaatctgaattaaattcacattcacatcacgctgcattctttattnctccaaattttcaattttnttactagctaactaaatgaccagaagatgagtttnggacatattttgtatcattaaattccaacattatattacttttcctacttatctaatagtaattgttttncaacaacttcatatcatattatatnattccacancc

SEQ ID NO: 1081 - DNA, 267 bp, Glycine max
  Clone ID: 700554688H1
gactgatgctgcatttctaaaaacatcctctcacgagccttccctttcttctggtacaactgcaataactgcaattatatttggaaggtctttacttgtagccaatgctggagattgccgagctgttttgtcccaccatggaagggccatagaaatgtccaaagatcataggccaaactggcatcaatgaaaggacacgagttgagtccctaggtggctcatgatgatggttacctaaaggccagttaggtgtcatcgtgctctgga

SEQ ID NO: 1082 - DNA, 88 bp, Glycine max
  Clone ID: 700554689H1
cgtcattgtatacacgcagtcgcattttcctaatgttaggggcaagtttgcaaatttaaattggtttttttatcacatgatggttttt

SEQ ID NO: 1083 - DNA, 79 bp, Glycine max
  unsure (1)..(79): unsure at all n locations; Clone ID: 700554690H1
gttctcgtaattgnctacgtagagttcngangaacgcaganctgnncccaggaaatcagtctgtgacccatgnagcant

SEQ ID NO: 1084 - DNA, 267 bp, Glycine max
  Clone ID: 700554692H1
ttacattagattggtggtaatggcagcgtcactacaagcagcagctactttcatgcaacccaccaagttgagcaggagcaacactttgcagcaaaagtctactcagtccatttccaaggcttttggtttggaacctgttggagctaaaaaggtcacatgctcccttcaggctgatcttaaggacttggctcacaagtgtgttgatgctaccaaaattgcaggattcgccctgccacctctgccctcgttgtctctggggcaatgctg

SEQ ID NO: 1085 - DNA, 92 bp, Glycine max
  unsure (1)..(92): unsure at all n locations; Clone ID: 700554693H1
caattggaatttggaatttgggaggnccagcgaantgannaaaaccctncgcatncgctgantgatttgcaatcgcatagaaattccaatcc

SEQ ID NO: 1086 - DNA, 183 bp, Glycine max
  unsure (1)..(183): unsure at all n locations; Clone ID: 700554694H1
gtcccttctcatttttcacccttacttcctccaaaccctcacccggctccacttctggaccacacccacggcctcaccccctcctagcaccatgcccccctcttnctgctccgctgtcaccgccaaactcctccccttcaagttccttggcttcgacctctccctcttccgcatcctccactc

SEQ ID NO: 1087 - DNA, 265 bp, Glycine max
  unsure (1)..(265): unsure at all n locations; Clone ID: 700554696H1
gcatggggttaccttggaagtaggagatttttggtagaacttgacatgcactcagatgctgttcatggcctaatcatacattaattgaaacggtcattgaaattggttctgttggaaagggtctcagtcaaggtgttaaaaactttttgctcataaagagggggatcttctgccacaaatcagacagtggctgcctgaaacgtgcacagatcatgatatctgnaaacattaaganaccatctgcnatggctcaaatcngggatac

SEQ ID NO: 1088 - DNA, 302 bp, Glycine max
  Clone ID: 700554701H1
gttcaggagcttctttgaattcgttggtatggtttctagaggggaaagaccttgcatcaaggcaaagtgctgctttgttgcttaaagaagtgtgtgttcaagaattggccaaggttggagaagttgttgaagctttggttaagatggttagggagcctattgggagcacttccaccaaggcttgtttggcaacaatttttaacttggtgtcgttggctgcgaatagagagggaattgctcaaagatttgtggagttgggtttggtttcacttttgctagaggctatgttgatggagagaaag

SEQ ID NO: 1089 - DNA, 294 bp, Glycine max
  unsure (1)..(294): unsure at all n locations; Clone ID: 700554702H1
ttcttattgtgcttgtgtgtgtgctataaatccttcgtggtttttggtgaccctttgggttctatagttagtctaagntaacccactttgagaattctcataaagttgcatgcttttggattggaaggttgttgcaatggggaaggttgtgttgttgtttctttgcatggtattggtggtggtgccttggcttgtactgattcaattcagaagcttgaggttcagaagcacttgaagaacttgaataggcctcctgttaggtccatcaagagtcctgatggagatgttatgatg

SEQ ID NO: 1090 - DNA, 298 bp, Glycine max
  unsure (1)..(298): unsure at all n locations; Clone ID: 700554703H1
cgaacgtgtgccctttctcttcaccatcaagcagttggtggcatcngggaagccagatagctttagtggggagtttctagtcccatcctaccgtggaagctctttcttggaccccaagggaagaggtgcttccacaggttatgacaatgcagttgctttgcctgctggtggaagaggagatgaggaagaacttgccaaggaaaacaataaaagtgcctcatcatccaagggcaaaatcaccttgagtgtcaccaagaccaagcctgagacgggtgaggttatcggtgtgttcgagagt

SEQ ID NO: 1091 - DNA, 296 bp, Glycine max
  unsure (1)..(296): unsure at all n locations; Clone ID: 700554704H1
aaaatgttgcagcttctgtacgcggtgatatttgcggaaatgttcgtgatcgtnagcttcctcttcaaaactccggcgaggaagctggtgatcgtcacattggatcggctcaagcgcggtcgcggccccgttgtcgtcaagaccgtcgccgccacgctgctggtggtgctcgcttcctccctctacagcatcgcaaaaatccggcatcggaacctcgatgctcccgtcgctaaccccaccgaccaagtcctcgtgtacaancacatgctcgaagcttctcttatggggtntgtgct

SEQ ID NO: 1092 - DNA, 292 bp, Glycine max
  Clone ID: 700554706H1
gtttgagagagaacgaacttgtccattatgcagggcattggtaaaaccagctgatctgcggaccttcggagatggatcaacaagtctattttttcagttgttttaagttcattttctttgacttgttgggtcatgtttttgagccaaaatcttcctggaaaatgtcaccatctatggtttggtaaaattttccattaatgaaattgagattgaaaaaagaataaagagatatttatatgtatggttaaagtatataagttcatctagagtaatgaggtcagatgtacaaagg

SEQ ID NO: 1093 - DNA, 293 bp, Glycine max
  unsure (1)..(293): unsure at all n locations; Clone ID: 700554707H1
gttcctgttcttttgaagggaagtggtgtatttacattggcaaagatatatcaatttataagagaatgatatatccaaacccaaggtacattattttccacagcagatgttctntcataacttctatagaatctatgcacatgtagctaatagaatatactatnaatatataatatttgctttcatgtttctgtgattgcatgcttcctttgggttcccgatgctctagagcaaccatttcctaatggccaatttgatctagtgtagtccatggagattggagagcatatgcc

SEQ ID NO: 1094 - DNA, 292 bp, Glycine max
  Clone ID: 700554708H1
taagaagcatgcttgtgtatccagcagtattgttgggtggcattcaactgttgggcaatgggctcgagtggataatatgaccatccttggagaagatgtccatgtatgtgatgaaatttacagcaatggtggtgttgttttgccgcacaaggagatcaagtcaaatattctgaagccggagattgtcatgtgagtgaggtcaatgatgttcaaattggtaccatgtggtgaggaggtagaaaaattattgagtctggaatatgtttgtccgtttcattggttttccttttac

SEQ ID NO: 1095 - DNA, 295 bp, Glycine max
  Clone ID: 700554709H1
aggaggttgagtagttcttcatcatagtcttaaacattaaaccttagcaaaactcaacaatgctagacatcaaaggctacctcgtactcttcttcctatggttcatatcaaccattctgatacgttccatcttcaagaaaccacagcgtctaagactcccaccgggtcctccaatttcaatacccttgctgggacacgcgccatatctccgttcactgctccaccaagcattgtacaagctatcactgcgctatggacccttgatccacgtcatgatcggttcgaagcacgtggt

SEQ ID NO: 1096 - DNA, 294 bp, Glycine max
  unsure (1)..(294): unsure at all n locations; Clone ID: 700554710H1
cgatgaggaagctgttgctcgccttgaggaaataaaaaaatccattgaggcgaantggctttacggcaaagcaatttgaatccagaaaggcctgactcaggatttttaaggacattggattctatccattaagcgcaacactgctgttattaagaaactgaagcagattaatgaagaacagtgtgaagctctgatggacgagttgcgaagtgtcaacttaagcaaatttgtcagtgaagccgtggctgctatatgtgatgccaagcttagaagttctgatatacaagctgcagt

SEQ ID NO: 1097 - DNA, 292 bp, Glycine max
  unsure (1)..(292): unsure at all n locations; Clone ID: 700554711H1
caggatttgaggtgctggagaagaagggataaagtgtatggtatgggggcgtggtgaccganggcacgaaaggaggaaactattggctacagaaagtcgtttctttagccgggtttctttcaaaaaatggtgcagagtctctgtttgatggcttctcatggttaccctcctggccttgtcttgcacccacaagtactgggcttgccctgcgctaccatgaagggctaccaaacattctttccttctccagtagcaaaagcagacctgatcagatatcagtctcgttgtcttg

SEQ ID NO: 1098 - DNA, 291 bp, Glycine max
  Clone ID: 700554712H1
cacaattctctcttatcatctttgttattacctctttccaaagtccaaattttctagttccaccaaaccaaaccaaaccaaaatggcagcagcctcagcctcatccatgatatcaacaccagccttatctccaaccatccaaaagcaccatcatttgaagccatccaacgtgtgcttccaaggtcttagacccctcgcaaggttcaccaaagcctcatcaaccaaagtgagcaccaccaccaaaagggttattccaaagggtggtgttagagtgaatcaatcagcccttgt

SEQ ID NO: 1099 - DNA, 283 bp, Glycine max
  Clone ID: 700554713H1
aagcaaagctcatccttgagttaaaaaatggcagcagcttcttccatggctctactcatccccatccttggctggcaaggccgtgaagctgggcccatcagccccagaagtgggaagggtgagcatgaggaagaccgtcaccaagcaggtctcctcaggaagcccatggtacggcccagaccgagtcaagtacttgggcccattctatggcgagcccccgtcctacctaaccggtgagttcccaggcgattacggtgggacatgctgggtttccgcagaccca

SEQ ID NO: 1100 - DNA, 295 bp, Glycine max
  unsure (1)..(295): unsure at all n locations; Clone ID: 700554714H1
tcctcttcacaaactttgatgtgcatcatagttatttaagtggttgcttntgtcatctgtaccactgggacaagttaccaccgtcaatgtgttgtttgcaatagcattttattctcataaattagagtaatgaagttagcatgtagagattattggtatnatnagaatcttaaaganatcagacaaattgactgattaatgtattgttttgcccgtgattttgtctggatgaatggattatggttgtaacatgtaacnnaccaaaaagcaaaannnnggggcngccgncgactcc

SEQ ID NO: 1101 - DNA, 286 bp, Glycine max
  unsure (1)..(286): unsure at all n locations; Clone ID: 700554716H1
cttccagagtgatcaacatangtnaggacatctttgctggatttaattgtacncttcgtggaggtaatgtcactcaccatgagtacattcaggttggaaagggaagggatgttgggttgaatcaagtatcaatgtttgaagcaaaggttgccagtggaaatggggagcaagtcctaagtagagatgtgtacagattgggtcataggctggattttttccggatgctctcattcttctacactactgtggggncctcttcaacactatggtggtggttctgactgta

SEQ ID NO: 1102 - DNA, 301 bp, Glycine max
  unsure (1)..(301): unsure at all n locations; Clone ID: 700554717H1
ctnctcacngcnttcttcagagnctgcacttgtnccacccttcaacataccncctcctcctctnccccaattctcttatccgtaatctggcactcttcagagaagactttgtaagataaaaagagaaatggccttagaccagtattttgatgaggctgtgccccagttggattccttggaagataaatcgtctctcgaaacatggaaatgtggcagtgacgatattgcagattcggatagaaatgcctctggtggctttgatgcaacatatgcctggagtgtgtgcaagatccagtggtca

SEQ ID NO: 1103 - DNA, 81 bp, Glycine max
  unsure (1)..(81): unsure at all n locations; Clone ID: 700554718H1
tgccaaatccgtggttntacttncgcttctcagtaanaaantccttacntgtcccgacgagattngaatngtgangcatga

SEQ ID NO: 1104 - DNA, 292 bp, Glycine max
  Clone ID: 700554719H1
ctgctctagaaaattcagtggtgatacatggcttcggctactctctctgtagccaaaccagcccttcaggcaaatgggaaaggcttctctgaattctctggcctccgcagctcatcaggcttccttcccttttctagaaaatctacagaggatttccattctgtcattgccttccagacctatgcagttggaagcagtggaggatacaagaagggtgtgacagaagcaaaactgaaggttgccataaacggatttggaaggattggaagaattcttgaggtgctggcaggtc

SEQ ID NO: 1105 - DNA, 295 bp, Glycine max
  unsure (1)..(295): unsure at all n locations; Clone ID: 700554720H1
atcactttttcctactttcttctccatccatcccttgactaattaattatccctcacaactaccaatgncccgaagagaaacaccacaagcaccgcctcttccaccaccacaaggacgnggataataagccagtagaaaccgatactggttacgacaacacatcatattccaagccttctgatgactatgactctggtttcaacaagccatcgtatgagtcttctggcggtggctatgaaggtggttacaacaaaacatcttattctagtgatgagccagcttctggtggtggct

SEQ ID NO: 1106 - DNA, 291 bp, Glycine max
  Clone ID: 700554721H1
cacttctgctccgcaattatcatgggcaaggtcaagatcggaatcaacggatttggaagaattggccgtttggtagccagagtggctctgcagagagacgatgttgaactcgttgccgttaacgaccctttcatcaccaccgattacatgacatacatgtttaaatacgacagtgttcatggacactggaagcatcacgatgtcaccgttaaggacgagaagaccctctcttcggtgacaagccagtcactatttttggacacagaaaccctgaagagatcccatgggggt

SEQ ID NO: 1107 - DNA, 281 bp, Glycine max
  unsure (1)..(281): unsure at all n locations; Clone ID: 700554722H1
catttactaattttnctttctttcttagacctttgcttcgatctgattttgaaagcttgactttgggtttaggttttgttttactatttgatcggatcggatcggatcttgctttcgccattaattactcatggagatccgtgccgntgcagataccagctccttttcaagtttgttcgcagctgtgtcatatggatttacatcaatggccatggtttttatcaacaaggctgttctatgcagtatgcatattcaatgactctcctcactctgcagcaatg

SEQ ID NO: 1108 - DNA, 283 bp, Glycine max
  Clone ID: 700554724H1
catttactaatttttctttctttcttagacctttgctcgatctgattttgaaagcttgactttgggtttaggttttgttttactatttgatcggatcggatcggatcttgctttcgccattaattactcatggagatccgtgccgatgcagataccagctccttttcaagtttgttcgcagctgtgtcatatggatttacatcaatggccatggtttttatcaacaaggctgttcttatgcagtatgcatattcaatgactctcctcactctgcagcaattgg

SEQ ID NO: 1109 - DNA, 288 bp, Glycine max
  Clone ID: 700554725H1
gaaaaagttaatgggatcgctgaggatcttaactgggaggttttcagggacaccctgattgaacaagctgagcagggtgtagattacttcaccatccatgcaggagttcttctgagatatgttccattaacggcaaggcgcatgacaggaatagtatccaggggagggtctattcatgcaaagtggtgcttagcttaccacaaagagaattttgcttatgagcactgggatgagatacttgacatctgcaaccagtatgatgtggctctatccatggtgatgggctaa

SEQ ID NO: 1110 - DNA, 290 bp, Glycine max
  unsure (1)..(290): unsure at all n locations; Clone ID: 700554727H1
aagaagancttagctacaagctaaggaaggatcaaagagaatggctcaagcaatggcatcaatgactagcttacgtggttcctctcaggctgtgttggaaggtagccttggctncacacgcttgaatgtggggagtggaagcagggtggcctcagtcacacgtgcagggttcacagttagagcacagcaacaacaagtgaatggtggtgaggtacaaagtagccgtagggcagtgctttcacttgttgctgctggtttgaccactggctcttttgttcaagctgtgcttg

SEQ ID NO: 1111 - DNA, 291 bp, Glycine max
  Clone ID: 700554728H1
ctcgatacaaaaatacatagaaatggcctcttctcttgcatcctcatcaactgttctctggatcctttttctaaccattgcaactcttcatttgagttcagccaggaagttgtccgggtcagacccgcagttgcagtttcaataccacagaggccctctcctcaaaggcaaaatctcagtaaacctcatttggtacggtaaattcaaaccttctcaaaaagccatcgttgctgatttcatcacctcgctctcctctcccaaacccgtcaccgcccaaccatccgttgccag

SEQ ID NO: 1112 - DNA, 293 bp, Glycine max
  unsure (1)..(293): unsure at all n locations; Clone ID: 700554729H1
ccccctccacccacccagcatatctctctattcnnatttattagcacccctcacattaccttgtgtcaccaactactttgactcctttaccataccattacaataattatcaaacctaaccagtaaaaatggtgaccgtggaggaaatccgcaacgctcagcgttcccatggacccgccaccatcttggccttcggcaccgccacgccgtccaactgcgtctcccaagccgattaccctgactatacttccgcattaccaacagcgtacacatgactgatctcaaagaaaagt

SEQ ID NO: 1113 - DNA, 294 bp, Glycine max
  unsure (1)..(294): unsure at all n locations; Clone ID: 700554730H1
ccccctccacccacccagcatatctctctattcntatttattagcacccctcacattaccttgtgtcaccaactactttgactcctttaccataccattacaataattatcaaacctaaccagtaaaaatggtgaccgtggaggaaatccgcaacgctcagcgttcccatggacccgccaccatcttggccttcggcaccgccacgccgtccaactgcgtctcccaagccgattaccctgactactacttccgcattaccaacagcgnccacatgatgatctcaaagaaagttc

SEQ ID NO: 1114 - DNA, 135 bp, Glycine max
  unsure (1)..(135): unsure at all n locations; Clone ID: 700554731H1
cctttnncccctgaaatcactgatccacaacaagaggnactcagagagcatttgttgattnggatntggaaggttccactntggttatggaancaactnagctccctncctctctctttattttccacattgtat

SEQ ID NO: 1115 - DNA, 296 bp, Glycine max
  Clone ID: 700554732H1
gacatcatgtgggtcacctgagacatgttgttcaatctgctacaaccatgaacttgtttcctaccaaggaaaacaacgtgacaccaaaggacctgacagctatggatttgttctctccacaagcttcctcctatcgtccttcagaggagattccaaccttgattaattccagtgcaattaaatctgtgagcaagagtgctaaaactgcacagatgacaatcttttatggtggacaagttgttgtctttgatgattttcctgctgacaaagcaagtgagatcatgtcctatgccacc

SEQ ID NO: 1116 - DNA, 298 bp, Glycine max
  Clone ID: 700554733H1
cgatgaggaagctgttgctcgccttgaggaaataaaaaaatccattgaggcgaactggctttacggcaaagcaatttgaatccagaaaggcctgactcaggatttttaaggacattggattctagcattaagcgcaacactgctgttattaagaaactgaagcagattaatgaagaacagtgtgaagctctgatggacgagttgcgaagtgtcaacttaagcaaatttgtcagtgaagccgtggctgctatatgtgatgccaagcttagaagttctgatatacaagctgcagttcaga

SEQ ID NO: 1117 - DNA, 53 bp, Glycine max
  unsure (1)..(53): unsure at all n locations; Clone ID: 700554734H1
gctcccncacacacacaccccttcatgnntcncagcaccgacttccaccgnng

SEQ ID NO: 1118 - DNA, 286 bp, Glycine max
  unsure (1)..(286): unsure at all n locations; Clone ID: 700554735H1
tctcacacacccctcgcatccaacaatgtctctcaccattccctccaacctctccaagcccgccgccctccgccccaaactaagcccaaagctaaggtccgccgccacaaccaccatcgtctgnnnnnnnnnnnnnnnnnnnnnnnnnnnnnnngtgtcctccgacctgaaggcttctccgccgcgctggccctctcctccatcctcctctccgcccctctccccgccggcgccgacatctcggggctcaccccatgcaaggagtcgaagcagttcgcgaagtgag

SEQ ID NO: 1119 - DNA, 291 bp, Glycine max
  unsure (1)..(291): unsure at all n locations; Clone ID: 700554736H1
ccggcgctgaccgcaaggnggccgccgagagcacgctctccgcctacaaagccgctcaggacattgctaataccgagttgcctccaactcaccctatcaggctgggtcttgctctgaacttctccgtgttttactatgagattcttaactctcctgatcgggcttgcagccttgcaaaacaggcttttgatgaggctattgctgaattggatacattgggagaggagtcatacaaggatagcactttgatcatgcaactgctacgtgataacctcaccctctggacctctg

SEQ ID NO: 1120 - DNA, 282 bp, Glycine max
  unsure (1)..(282): unsure at all n locations; Clone ID: 700554737H1
attccttcatttttaaacctagctccatctccctccactcancataacatgnccatcagnagcaaatgctgccaacaccaacttctgtgtaaatgttagcaacaatggctacattagtgctaatgaccccttgaactggggtgcggcggcggaggctatggctgggagccacctcgacgaggtcaagcgcatgctagaggagtaccggaggcccgtcgtcaagctcggtggagagaccctgaccatctcgcaggtcgcggcgatcgcggcccacgaccaggg

SEQ ID NO: 1121 - DNA, 291 bp, Glycine max
  Clone ID: 700554738H1
ccttgctgatcctcatcatgggaaccatttttcctcctcactctctctctccactcctcaacatcaaaccttcaccctcaagaattctcttggctccctctccccaacccaagtcaaattctctcttttgctccaaacccattgtttcaagtctcagaaagaaccaaacttcatctcccaaaccttcatcgggcacaagctggttggctcatgctcaacagggcctagcagctttggctatctccttggcactcaactttagcccagttttgtttaatggcaatgcattgg

SEQ ID NO: 1122 - DNA, 290 bp, Glycine max
  Clone ID: 700554739H1
ccaaacttgagcttcttcttgtttcttgctcgtggaagcaaatgacaaccgcgccctctctaactggtcccttgtcaaacgcggtcggattcagtgactggaaaaaacatgcccctttgtcagcttctctctgtaaactaagctccagttcaaatatagttgacatgaagatatctcgatgtggttgtcggaaagttggacatggccaaagatgtttccgattatatgccctatttggaggaaaaaaggacaataatgggaaaagtgatgatgttccttctaaggccgga

SEQ ID NO: 1123 - DNA, 288 bp, Glycine max
  unsure (1)..(288): unsure at all n locations; Clone ID: 700554740H1
cacatgctcttatcctgtgtttcgaaatgaatatgattatnttgtggcagttctgaatctctatttcaaatataatgttacgagcgttctaaatgatgctggatatgttccgtctaatactgaaaagtatccccttggaggcatcatctctgccattgagaatgcttttcacgcatctcctcaaatagtttgctcgaaagattctgttgaggaacttcgcctatgcttttataaggacttccagccacgagattgtgctcttggatctgacataanatcaacaggtta

SEQ ID NO: 1124 - DNA, 106 bp, Glycine max
  unsure (1)..(106): unsure at all n locations; Clone ID: 700554741H1
ccttngtaggacccttatctctntctctntctatctcncncgantnantgttcgttcgaccnttttacttagtattccctgtttccggtattnggctccctttntt

SEQ ID NO: 1125 - DNA, 121 bp, Glycine max
  unsure (1)..(121): unsure at all n locations; Clone ID: 700554742H1
acacaacacaacacanaccattcantttctccttcatggctctnntcacatcccaacctaaaaaccccattctccatcgcttcaccacccttcactgcnctnttccacgcntanntaggcc

SEQ ID NO: 1126 - DNA, 287 bp, Glycine max
  Clone ID: 700554744H1
tggaactcactatgctgtcatgagctcctacgagtaccttagcactggacttcgccagtacttggacaacaacatggatggattttacattgctccagcttttatggacaaacttgttgttcacattaccaagaacttcatgaccctgcccaacatcaaggttcctctcattcttggtatctggggaggcaagggacaaggaaaatctttccaatgtgagcttgtctttgccaagatgggaatcaaccccatcatgatgagtgctggagagttggaaagtggaaatg

SEQ ID NO: 1127 - DNA, 287 bp, Glycine max
  unsure (1)..(287): unsure at all n locations; Clone ID: 700554745H1
gtgcctctaactgtccacgacacggaggaggacgacggttctgatggctccaccgnnnnnnnnnnnnnnnnnnnnnnnnnnnnnnnnnnnnagcctaaganaggcaaggccgcgttgcctcttaagagggacaggacgagatctaagaggttcttggaaattcancaattgagggagcgtaaganagagtatgacttgaagacagcaatatctttggttaaagaaacagctaanaccaagtttgtagaaacagtagaagcccntnccgcctcaacttgacctaaata

SEQ ID NO: 1128 - DNA, 290 bp, Glycine max
  unsure (1)..(290): unsure at all n locations; Clone ID: 700554746H1
gcaaaggttgcagattntggtcttgcaaagttttcntctgatgtcaatacccatgtttctactcgagtgatggggacttttgggtatttggctccagaatatgcttctagtggaaaactcacagacanatcagatgttttctcctatggaatcatgctcctgagttaataaccggacgacggccagttgataaaaatcaaacttacatggaggatagtttggtagactgggctaggcctttgctcacacgagctttggaagaggatgattttgattctattattgaccca

SEQ ID NO: 1129 - DNA, 289 bp, Glycine max
  unsure (1)..(289): unsure at all n locations; Clone ID: 700554747H1
aagaagancttagctacaagctaaggaaggatcaaagagaatggctcaagcaatggcatcaatgactagcttacgtggttcctctcaggctgtgttggaaggtagccttggctccacacgcttgaatgtggggagtggaagcagggtggcctcagtcacacgtgcagggttcacagttagagcacagcaacaacaagtgaatggtggtgaggtacaaagtagccgtaggcagtgctttcattgttgctgctggtttgaccatggctctttgttcaagctgtgcttgctg

SEQ ID NO: 1130 - DNA, 293 bp, Glycine max
  Clone ID: 700554748H1
cacacacagagcaacactgcactgtgtggaaacgaaacatggcaagagtggtggcactccaacagaaccaactatctttctctaccttagcttcctctctttctgacttcagtggaaccagacttcaaactcaacttcagttcaagagaaagcaatgccatccaaaagggtctttctacgtctccgcatcgagcaccaagaaaatcctaataatgggaggcaccaggtttattggtgtgtttttgtctaggctcctgtcaaagagggtcaccaggtgactttattcaccaaga

SEQ ID NO: 1131 - DNA, 293 bp, Glycine max
  Clone ID: 700554749H1
gagagagagatggaggagaagacggagaaggtgaagtctgaggcagttcagataattgaagcgtttgaggttctgccaaagctcgtggttttcgatctcgattacactctctggcctttctactgtgagtgtcgatcgaagcgcgagattccttctctgtatccccacgccaaaggcatattgttagctctcaaagagaaaggcatcgacattgccatcgcttctcgctcgccaacggcagacatcgcaaccgctttcctcaacaaattgaacctcaccccaatgttcgtctc

SEQ ID NO: 1132 - DNA, 291 bp, Glycine max
  Clone ID: 700554750H1
gggactatgagaaggttggtaaaaagatagagcgatctggaaaatcaataagttctcctccagggttgttttttcaacatgcaggtcatagggataaagttgttgacttccattggaatgcatatgatccatggacgattgttagtgtgtctgatgactgtgaaagtactggaggagggggaacgttgcagatatggcgcatgagtgatttgatctacagaccagaagatgaggttttggccgagctggagaaattcaaatctcatgttgtggcgtgtgcttcaaagactg

SEQ ID NO: 1133 - DNA, 287 bp, Glycine max
  Clone ID: 700554752H1
ttcgatttctgattcttaatttttatttattaattgttactgtgttactttacaggattggctacttatggagagaaagagtggtacttcttttcaccacgggaccggaaatacccaaacggttcgaggccgaaccgggcggctggcaccggttactggaaggcaaccggggcggataagcccattggtcagcccaaaccggttgggattaaaaaagctttggtgttttacgcagggaaagctcctaaaggggacaaaagcattggatcatgcacgagtatcgtctc

SEQ ID NO: 1134 - DNA, 288 bp, Glycine max
  unsure (1)..(288): unsure at all n locations; Clone ID: 700554753H1
ctaatctttagtcaatcctctaataatctccgtttcaacaccaaactcagtcttaaacagcaagcgaaagtgaatcaagccttccaagttccaccaccaccgtcccaacnnnnnnnnnnnnnnnnnnnnnnnnnnnnnnnnnngaaacaacctcatccatactnaggaaacaaacgacagagactgcaaccatgtacgttgatcacgcgttttcgatttcggacgaggatgtcatgatgggaacctcgtacaccgtcaacaacaaaccccccatcaaggagatcgccc

SEQ ID NO: 1135 - DNA, 283 bp, Glycine max
  unsure (1)..(283): unsure at all n locations; Clone ID: 700554754H1
tttaaagatcaatcattgaaaattatcatgtgattccatgacttgttgatccccctttcccccggccataccacaaggtaaaagggataatttgtttcagtgtgagtccatgtggtttactctctgtaggtgcattcttctaaatgtataaggaaaaaagaatagtctttgctgaggatttgggggcatttgtaaaagcttatttgagcttatgaagatgacttatgttataatctntttagcttatganataagctcttattgataagagatattattatag

SEQ ID NO: 1136 - DNA, 289 bp, Glycine max
  Clone ID: 700554755H1
aatcaacaaaccaaaaaggtaaactttttgcaacaaccatggttgcaatggcagcagcaacagcatccacccagttgattttctcaaagccttgttccccttcacgtctatgccccttccaactatgtgtctttgcacactaaacaagtgctatcaagtggcaggagaaggcatgtggggggttctggagttaggtgcatggctgtgggggaagcagcaaccactgggacaaagaagagaagtggatatgagcttcaaacactcactagctggttgctgaagcaggagc

SEQ ID NO: 1137 - DNA, 289 bp, Glycine max
  Clone ID: 700554756H1
caacatcaccgcagtaattgggtagatgctgaagaggatgatgaagatgaacaggatgaagatgaacaggatattcagccaacaccaccgtactatgaagaacattaattcagagaactctactgtaatggttctcctttacctcagtaactgcttgtggcgattctcttaagttgctttgtctctttaagtttcttttaattgatccagtaatctatcaataaaaggattgaatagccataaattgctgagtttcttgtatgtattatattattaaatcttcccatta

SEQ ID NO: 1138 - DNA, 286 bp, Glycine max
  unsure (1)..(286): unsure at all n locations; Clone ID: 700554757H1
tgcaaatttacaaccaataaatttggtctttgctcaagaaaaaccagacagataccgagcttttgtggactatgaagatggatattcntacgtatatcccattgattggaaggaatttgacttcagggctcatgattctgcattcaaagacagatatctacagttacagaatgtaagggtgagatttataccaactgagaagaaagacatccgagaattgggtcccatggaagaggttgtatacgatttggtgaaacatagatacgctgcaccaaaccaaagacca

SEQ ID NO: 1139 - DNA, 98 bp, Glycine max
  unsure (1)..(98): unsure at all n locations; Clone ID: 700554758H1
agacantggagctgtgcactcgaaccttcanaagtntactttcttttgcaacncttctgtgnctgcttcaaancccctgtntcttgcgtgacnaatgc

SEQ ID NO: 1140 - DNA, 117 bp, Glycine max
  unsure (1)..(117): unsure at all n locations; Clone ID: 700554759H1
tctcaattcccacatccccaaaccctagttttgttccatttcttaaatcaaaatttatgcatacttcagacacctagtttcatatcatcattccacacaacntacgnttncgtatnt

SEQ ID NO: 1141 - DNA, 283 bp, Glycine max
  unsure (1)..(283): unsure at all n locations; Clone ID: 700554760H1
gctttggaaaactatgcatacaacatgaggaacactgtgaaggatgacaaaattggtgagaaacttgatcctactgacaagaagaagattgaggacgcaattgagcaagctatccagtggctagacagcaaccagctcgncgaagcagatgaatttgaggacaaaatgaaggaattggaaagcatctgcaatcctatcattgccaagatgtaccaaggtggtgctggtcctgacatgggtggtgctggtgctggggcagccgaggatgntatgctgctcctct

SEQ ID NO: 1142 - DNA, 279 bp, Glycine max
  Clone ID: 700554761H1
tggagacaaaaccacaatacagttttagaatggagaagacagcagttaaagttcgatgccagaggattgggtgcgacgccatgttctccgaggccgacaaccccgacggttcctgtcgataccatgattcgggacctatatttcatgatggaacaaaagaatggagttgttgcaagaaaagaagtcatgattttagcttgtttttggaaattccaggatgcaagacaggaaaacatacaacagttaagcaagttattacaccagtgaagaagaacacca

SEQ ID NO: 1143 - DNA, 96 bp, Glycine max
  unsure (1)..(96): unsure at all n locations; Clone ID: 700554762H1
tgttactganacacttncatcccaaaccantgtntgtntctnttttcggntttnctaattcataatgngtagtgagaaagagancggggatgnggg

SEQ ID NO: 1144 - DNA, 240 bp, Glycine max
  unsure (1)..(240): unsure at all n locations; Clone ID: 700554763H1
gagagcaggagactagcctcgaaatcttgtacatgtgccttgctaggtaataaggtgtgatatcacacccatcttccngtttttactttttaggatttaacgtcttgacatgtataagttgcgtcacgattgacaaatgtgaatcaacaaagctatggtccgcgaacctgagactcaatgtacctatgcacgtatcaatcttcataaagtgcttactctgtttaagagttggaaggattt

SEQ ID NO: 1145 - DNA, 291 bp, Glycine max
  Clone ID: 700554764H1
tggcaaaagcttttatccaggttcttggtaatgagaaggccagcaaggaagtattcaacatctcgggagataagtatgtcacatttgatggattagcaagagcatgtgctaaggctggtgggttcccagagccagagatcattcactacaaccctaaagattttgattttgggaaaaagaaatcatttccattccgtgaccagcatttctttgcatcagttgagaaagcaaagagcgtgcttggattggaacctgaatttggacttgtagagggtctagcagactcgtaca

SEQ ID NO: 1146 - DNA, 298 bp, Glycine max
  unsure (1)..(298): unsure at all n locations; Clone ID: 700554765H1
ctgctcgngctttnngagnttctntaatgatgtcttagcatattttgaaagntnacaatcaaattaattcttaacaataggttcaggtcatgtagatctctacattgttgtttccntttgttattttcttttggttctttgttgttgtcttaatttatacttccataaagcttttgtggacatttctgactttcgccagtaattggtgtaaattaggatccaaaagccttggtcaagactcattcatatttgttcctaatgaggaaaacttgttgtcacatcccagagaaagatggtt

SEQ ID NO: 1147 - DNA, 290 bp, Glycine max
  unsure (1)..(290): unsure at all n locations; Clone ID: 700554766H1
agctagcaccacattcacctgaggcttccaaagcaatggcttcccttgcagcatccactgctgctgcttcccttggcatgtcagaaatgcttggaaaccccatcaacttcagtggtgccacaaggccagctccatctgcttctagtcctgcctccttcaagactgtggctcttttctccaaaaagaaggctacaccaacacctccaaaaaaannnnnnnnnnnnnnnnnnnncaatgatgagcttgccaagtggtatggtcctgacagaaggatcttcttgcctgagggt

SEQ ID NO: 1148 - DNA, 127 bp, Glycine max
  unsure (1)..(127): unsure at all n locations; Clone ID: 700554767H1
attgagcgaaaataannaagattcaacaattacataagaatanntaccantgatttctgaaacaaccatttcaattcaatcgataaattcagtaaattgttcattgaaaaaaaaaannntaagggtt

SEQ ID NO: 1149 - DNA, 288 bp, Glycine max
  Clone ID: 700554768H1
ccttcacaagattctcacaaacaactcttgagaaagaaagaatggctgccaacacattgatgagttctgccatctcagccttcccatctctcctttcctcctcaaaatccagatttgccgcagcagttcctctttccagctttgttgtcaccaatgcctcttcttctcgcttttccatgagtgctgactggatgcctggccagcctagacccccctaccttgatggttcagcacctggtgactttggattcgaccctcttcgtcttggtgaagtaccagagaatcttg

SEQ ID NO: 1150 - DNA, 287 bp, Glycine max
  unsure (1)..(287): unsure at all n locations; Clone ID: 700554769H1
ggaagaagcancaatggcgccgaagataacacgtaaggttagcagaaaccctgaattgatnaggggaattcggaaagtactcgaggtcgcagatgtaccacaagaggggcatttgggctatcaaggccaaaaacngtggcgttttacctcgccacgaccctaaacccaagcctgaagctcctgctgaaaaaccacccaaattttaccctgctgatgatatcaagaagccccttgtcaacaagcacaaaccgaaaccagctaagcttcagggctagcntactcccggg

SEQ ID NO: 1151 - DNA, 287 bp, Glycine max
  Clone ID: 700554770H1
ggaagaagcagcaatggcgccgaagataacacgtaaggttagcagaaaccctgaattgataaggggaatcggaaagtactcgaggtcgcagatgtaccacaagaggggcatttgggctatcaaggccaaaaacggtggcgttttacctcgccacgaccctaaacccaagcctgaagctcctgctgaaaaaccacccaaattttaccctgctgatgatatcaagaagccccttgtcaacaagcacaaaccgaaaccagcttaagctcagggctagcattactcccggg

SEQ ID NO: 1152 - DNA, 286 bp, Glycine max
  Clone ID: 700554771H1
tacctgggctgctttttggttgattttacttggcgtagttatgattgctggtggggcattccttgtgtacaagtacagaataaggcaatacatggattcagaaatcagagcaatcatggcgcaatatatgcccttggacagccaagcagaagttccaaatcatgtcaatgatcaaagagcatgaaggcaaaaatgggccaatccctggaatttcacggcaggcagcatgggtgtgacttttcctgtgccattttgaactctggtcattgaacttaatagactgtat

SEQ ID NO: 1153 - DNA, 286 bp, Glycine max
  unsure (1)..(286): unsure at all n locations; Clone ID: 700554772H1
ggactctacagcatcaatttgttgctgttaccgagtggtctggtgggctgtatgtatctccaaccatagctggaagcaggcctggaagtcttattgccggtgcatgggcagcgatgatatctctagggaaagaaggttacttgaaaaatacaaaaganattatggaagggtcaagaagaatacagcaaggcatagaggagattgctgagttgtttattgttggaaaacccgacatgacgatagtggcttttggatccgacgttctagatatattcgaagtcaatga

SEQ ID NO: 1154 - DNA, 275 bp, Glycine max
  unsure (1)..(275): unsure at all n locations; Clone ID: 700554773H1
agcagagataagtgatatgcaaaacatgtctctaatancttcactctcctccacaacttcacaactcacttcccttccttccctcccttcttcctcctctccactttctcgcaaatttcccctcactttccgggaaaaaaacagaactccaatcacacctcacaagctccctttttcagcaaggcctaccaccaccagagtggtgttggtgaagtctcaggccacagcacctgcttcttctgaggngtggcagtgacacctgtgtcttctgagnt

SEQ ID NO: 1155 - DNA, 284 bp, Glycine max
  unsure (1)..(284): unsure at all n locations; Clone ID: 700554774H1
tacctgggctgctttttggttgattttacttggcgtagttatgattgctggtggggcattccttgtgtacaagtacagaataaggcaatacatggattcagaaatcagagcaatcanngcgcaatatatgcccttggacagccaagcagaagttccaaatcatgtcaatgatcaaagagcatgaaggcaaaaatgggccaatcccttggaatttcacggcaggcagcatgggtgtgacttttcctgtgccattttgaactctggtcatgaacttaatagactgt

SEQ ID NO: 1156 - DNA, 279 bp, Glycine max
  Clone ID: 700554775H1
tggaccacaaactctcttctcagcctgacgctgtcttgcccgagttactgacggagttcatggtggacatgaaatgcgaaggttgtgttaatgctgtcaaaaataagttgaacgagataaatggagttaagaacgtagaggtggacttgagcaatcaggttgtgaggattctcggttcaacgccggtgaagactatgactgaagcttggagcagactggtagaaaagcccggttattggacaaggagtgccggaagactctaatatctgctgctgtttc

SEQ ID NO: 1157 - DNA, 275 bp, Glycine max
  unsure (1)..(275): unsure at all n locations; Clone ID: 700554776H1
aactccatagccttcaaatccttcgtcggcctccgccagtcctcgccggaggncccgcatttcgccgctccagccaagacccgccactccccaccgcaaattccgcgtcttggctggaaaattcagccccaagctcaatggccggaacanccgcgtggcggtggtgggaggcggtccggctggcggggccgccgcggagacgctggcgaaggcggcgtggagacgttctgatcgagcganagatggacaactgcaagccgtgcggtggcgccatc

SEQ ID NO: 1158 - DNA, 284 bp, Glycine max
  unsure (1)..(284): unsure at all n locations; Clone ID: 700554779H1
ttcggatttctgtttctctgtcttcattttagtttttacggctagaagaatgtccagctcatcggaatatttggtatttccggccaccacccggcgaactctccggcggaaaagtccactttctctcagacttgtngtctattgagccaatacatcaaggaaaagggtacttcggagaccttaccctcgggatgattgcactgccgaaacaaacgggttcccctgagacatcgtgtcatctgcaacaacatggagttgtttcccacgatcatcagcaacggaac

SEQ ID NO: 1159 - DNA, 289 bp, Glycine max
  unsure (1)..(289): unsure at all n locations; Clone ID: 700554781H1
gaaaattaatgcccctntcatttnctctgcatctgtagtatctatcaccaatcaattccactcttcttccnatcncaacaacannaaatcaatctgggaaacaanaacaaaatgccgtcattagaggaggaactcttcccatcaaccccaggaaagttcaagatcgagcggtcccaccacatgaaccgccaactctatcgctgtttcgcctccaccagcaccatgttcctgtgggccctcttcttaatcgccctcaccgttcctatctcagcttccaaggcttcgtcga

SEQ ID NO: 1160 - DNA, 287 bp, Glycine max
  unsure (1)..(287): unsure at all n locations; Clone ID: 700554782H1
caaaatactactatagaattggaagtggtgattctgctcgagacttttggttcgaaacacctcctaaagttgggccagatactccctacaaatttgggatcnttggtgatttggggcaaacgtttaattctctttcgacccttgagcattatttggagagtggaggagaggctgtgttatatgttggagatctttcttattctgatgaacatgactacaaagatatgggtttacggtgggatacatggggccgatttgctgaaaggagtgcagcatatcagccatgg

SEQ ID NO: 1161 - DNA, 284 bp, Glycine max
  unsure (1)..(284): unsure at all n locations; Clone ID: 700554783H1
atgcattcccgggtccnaagtacgacngcaagttcttacataataaagcacgtgagttgctgcaggatacgcgattgagccagacactgaccaatgttgtaataccaaccttcgaccttaagaaacttcacccagttatattctcaaactttcagctgaagacagttcctagctttgatgcgaantgtcagatatatgcattgggacctcagcagcaccaacttatcttccaccctattactttgagaatgatggcactgaattcaatttggttgatggtggcg

SEQ ID NO: 1162 - DNA, 110 bp, Glycine max
  unsure (1)..(110): unsure at all n locations; Clone ID: 700554785H1
gtgaagtgttcggattgcggcgacgtgagcggttcgctgcccgcgacgttgtgagnagtccactgaaccttatgcatttagaggaaggagttcttctcaaagttagnaga

SEQ ID NO: 1163 - DNA, 110 bp, Glycine max
  unsure (1)..(110): unsure at all n locations; Clone ID: 700554786H1
ccatgcctcaaaagggttgataataagtaaaaaanatcaatganttcatgataaaacccntctgcgttttnnngattataggtttttttgtcaatanagggatcnngggg

SEQ ID NO: 1164 - DNA, 276 bp, Glycine max
  Clone ID: 700554787H1
gttctttcactggaaggagaacaagaagaaaaaaccgacacaaagatctagtcctagctagaatcaaacaggggcgatctcaccttcaagaacacatcgccatggcaaggaacttgcttcttgtgcttttttgcagtagccaccctcctccatggctcagcagcccaaaccagacacatgctcggtgatgccacgggctggatcatccctgctggcggcgctgccacctacaccgcctgggcttccaacaaaaccttcaccgtaaacgacactctc

SEQ ID NO: 1165 - DNA, 283 bp, Glycine max
  unsure (1)..(283): unsure at all n locations; Clone ID: 700554788H1
gttgtctgtttacaacagcagcagtgatgcagctacagatccatctgttctaagtcaattagctgaaaaattgcaattgatgggaatagctgatcttactcaagaatcacttgccttgcatgagatggnggcatcaagtggtggggatccaggagcacgcatngagaaaatgtcaatgttattgaagaagataaaggatttcgtgcaaataganaatctagtcaaggatgataatttaggaggaaaaggcttttctcaaaagtctatggacttgggaccaatg

SEQ ID NO: 1166 - DNA, 277 bp, Glycine max
  unsure (1)..(277): unsure at all n locations; Clone ID: 700554789H1
aaaatggcagcagcctcctccatggctctctcttccccatccttggctggcaaggccgtgaagctgggcccatcagcccccgaagtcgggagggtcagcatgaggaagaccgtcaccaagcaggcctcctccggaagcccatggtacggcccagaccgcgtcaagtacttgggcccattctctggcgagcccccgtcctacctcatggcgagttcccangtgatacggctgggacntgctgggtttcggcgacccagaaaccttcgccagaaacgtg

SEQ ID NO: 1167 - DNA, 93 bp, Glycine max
  unsure (1)..(93): unsure at all n locations; Clone ID: 700554791H1
gcanaagcttcatttcagatactgantncttggatgtatgatccaanattcctagcaaggatgtggcaactagcaatctacactncccatnca

SEQ ID NO: 1168 - DNA, 108 bp, Glycine max
  Clone ID: 700554792H1
caacacaagaacggttttctgtgtctaagcgctcttagtggttccgattctttctccactttcaacttgtccgtttctcactctccctcaaatctcattctctctctc

SEQ ID NO: 1169 - DNA, 138 bp, Glycine max
  unsure (1)..(138): unsure at all n locations; Clone ID: 700554793H1
cactcactcactcactcactcactcactcgcaagcaaaaagaaagantcccaggcgaggagaaanatggangggaaggagcnggatgtgtcnttgggagcgaacaagttccccgagagacagccgattnggacggcgg

SEQ ID NO: 1170 - DNA, 288 bp, Glycine max
  unsure (1)..(288): unsure at all n locations; Clone ID: 700554794H1
attctctctgtgtatttccctacctctcncttcaagatgcagatcttcgtcaagaccctcaccggcaagaccatcacccttgaggtggaaagctctganaccatcgacaacgtcaaggccaagatncaggacaaggaaggaatccccccggaccagcaacgtctcattttcgccggaaagcaacttgaggacggccgtacccttgctgactacaacnttcagaaggagagtatcttcacctcgtcctccgtctccgtggtggnatgcagatcttcgttaagaccctca

SEQ ID NO: 1171 - DNA, 199 bp, Glycine max
  unsure (1)..(199): unsure at all n locations; Clone ID: 700554795H1
gcacgtacacacaaacgaaccaaggttcttcttctctgcgatcagatcgcacaanttttggnaccctaatctacnacattncgttttggaccttcatccgaatcgtaaaaatcantctctgcgaatcgaatcctctttctgacgtcgatcatttcgtcgactgagtcatttaaccctaaacattttacatggccatgac

SEQ ID NO: 1172 - DNA, 284 bp, Glycine max
  unsure (1)..(284): unsure at all n locations; Clone ID: 700554802H1
aaangagncanttatgcatctnctgctgctggaattagagaggaaactgggcagcaactgggagnnccgtattagttttagtgggcaggtgcaaaattaccaaagcacagtgtctcaagtggtaaatttactgggaaatgaggactcagctgaaattacttgagcaagtgcatatactcaattgggttgggtagcaatgattacctcaacaactatttcatgcctcaattctattccagcagcaggcagtactcaccagatgagtatgctggatgttcttattc

SEQ ID NO: 1173 - DNA, 234 bp, Glycine max
  unsure (1)..(234): unsure at all n locations; Clone ID: 700554804H1
gaagattccgcaacagagagtagancaagatggcgcggttgatcacagtggtgtggtgcgcggtggcggtgctactgtgcgccgcggcgggcgcgtacgtgggtggaggaggcggcgaacccgatacgaatggtggcgggggtggaggcggagtggttcgggtgatagggcactgncggcgcgcnctgaagtttgctangttcatgagcangttcgggaagagttaccgaagcg

SEQ ID NO: 1174 - DNA, 198 bp, Glycine max
  unsure (1)..(198): unsure at all n locations; Clone ID: 700554805H1
ctctncactctgcttctgcttctttggaaagcacttaaccaaactctctgtttcagcttcctctgntttttgggtacnaacagagtttctcctgttttngacgatggccataaaggcgattgaactgttnaaagggtgcggatcanaagaaaaataatggaagtgcttgctgcggtggcttcgganttgggggatgtg

SEQ ID NO: 1175 - DNA, 287 bp, Glycine max
  unsure (1)..(287): unsure at all n locations; Clone ID: 700554806H1
attaaccacaagcataagcacaagcacaagcacaagcacttntctaattccctttcacactgctattacaganttcacaagtgcttacacttcaaatggctttggnngcncttcaatnanncaccatatccactccatcgtttagtccctttnnganaccagtctcagttacttagagacaccgtggacgaaaggaaagcgttctaagcgtagccgcacggagcaacaactgcaacacccttcatncaccgaggaagagtacctcgctctttgtntcatcatgctcg

SEQ ID NO: 1176 - DNA, 69 bp, Glycine max
  unsure (1)..(69): unsure at all n locations; Clone ID: 700554807H1
caactatgagcaaggattatntaatcatactnnctctccttctttccacggtgcttgcaacttcnaagt

SEQ ID NO: 1177 - DNA, 284 bp, Glycine max
  unsure (1)..(284): unsure at all n locations; Clone ID: 700554808H1
gccgagtgaaaccccaatcccaatacactcccaactcacaaagccatgtctccaggtcctgttgtcgacgcttcccctgaggttgaagcagagcaacaacttccctccgtcgatgacgcaacccagttgaagaaatcccaaccgcaggaggagatgctcccgttgtcgaggacgtgagggnnnnnnnnnnnnnnnnnnnnnnnnnnnnnnnnnnnnnnnnnnnnnnnnnnnacaaggaagacgatgctctaggtggtgctgagggttcanagcagagcagaatg

SEQ ID NO: 1178 - DNA, 291 bp, Glycine max
  unsure (1)..(291): unsure at all n locations; Clone ID: 700554809H1
tctgtctcctccttganggtgnctgtcccactccttgcttgttggctccatcctgatgatcctncaccggcactgccgttnttctagctctgcaacnacttctatgtccttgataatancttgcagatctgaattancctctgttgatgtatattgctccatattggttcgtgtatgagttcttgatttgtagatcagtcataccgtgacagagagattggtggtgcgaactcggacaaccantaacagagcagtantcttgcgatggttataaacgangcagagtacgtc

SEQ ID NO: 1179 - DNA, 286 bp, Glycine max
  unsure (1)..(286): unsure at all n locations; Clone ID: 700554810H1
anggaaggaagggataattgagtgtgtggtgtgtantgtggcagctccgtcagcgtgagatggacgccgcagcaacaggttcggagctgaacaagtccggaagcggaggttcggagcgaagtgaggacagcggaggagggatatttgagtatctggctgggtttatcacttgggagtaaattccattggccatgagtactgtcatctccgattcctcttcataggggaaagtatgttctccatgtacaagcgtgatcctcacgataaccctggcctcaaacctatt

SEQ ID NO: 1180 - DNA, 286 bp, Glycine max
  unsure (1)..(286): unsure at all n locations; Clone ID: 700554811H1
ctaatctttagtcaatcctctaataatctccgtttcaacaccaaactcagtcttaaacagcaagcgaaagtgaatcaagccttccaagttccaccaccaccgtcccaacnnnnnnnnnnnnnnnnnnnnnnnnnnnnnnnnnngaaacaactcatccatactaaggaaacaaacgacagagactgcaaccatgtacgttgatcacgcgttttcgatttcggacgaggatgtcatgatgggaacctcgtacaccgtcaacaacaaaccccccatcaaggagatcgcc

SEQ ID NO: 1181 - DNA, 285 bp, Glycine max
  unsure (1)..(285): unsure at all n locations; Clone ID: 700554812H1
ttcctccaagtccacgttaacctcaacgagaattccgttgttcctagcgatgaactcgttcgccaaatcagnacccgtgtcnnnnnnnnnnnnnnnnnnnnnnnnnnngtaccagcaggtgccggagcaagatgctaataacgacttggacgcgtagagacaacacgtttcgcaggtacacgtccaacgttaccaaggggagtggcaaaggaacanccattgtttggttcangnagatctcananttttggataacgaggctctctataaggcatggctttcctc

SEQ ID NO: 1182 - DNA, 288 bp, Glycine max
  Clone ID: 700554813H1
ggatatcgattcaatctaatataacaggacctgggcaaacaattctcctcaaagaacgttgacttgtgacccattttctcagccagaatatcagctaatgtttttgacagaatggaaacttgggtagcaaactgttgaattgtcgcgctaaagtgtcggatccaccagaacccagcatatcagttaaaggaatatgaaatgcttctgacagaatggaaacttgggtagcaaactgttgaattgtcgcgctaaaagtgtcggatccaccagaacccagcatatcagtta

SEQ ID NO: 1183 - DNA, 287 bp, Glycine max
  Clone ID: 700554814H1
tgaaatatatgtttcctgatgctgagtgggtttgtggaaactatcttcattgtcacaatccgagattggagcaaaaatggatagaagttatggttgatactcaagtggatgaactcataaaggctgtgaatcacagattcagatctgaagattggttaatgctggtggcattcacagaacaatggtgtttgccaacactgttgaggctgttgaagctgtggcaaagatattactccgatctgggattgaatgttctcgttatcataagaatgcacattggaagagcg

SEQ ID NO: 1184 - DNA, 291 bp, Glycine max
  unsure (1)..(291): unsure at all n locations; Clone ID: 700554816H1
cgtagatatctctttttgccgcgacaaatgctaccatcatccactgtcctatctctcgccggaacccgcgccggcgttccggtgagcttttccggcgaactgggtcacctcgaaaccaagttttcttcaagacccagaaaggttttcagccgtngtgcataaaggggattcccttacaannaaacaccatcaatggtttgaattcgaagaacagaaactcactttcgagcttcgcattcggtaaaaaagccgaagacagctttttctcggatgtaatggagacaccgatga

SEQ ID NO: 1185 - DNA, 281 bp, Glycine max
  Clone ID: 700554818H1
gagactatgagaaagcctttgcccaacaccaacaaagttccaggttccaagagaaggaaattacaacatggagagaagttctggaacgagtagccagtctctctggttgggatatcagaaataaggaacaacctacagtgattgatgaattgttcagaagataaaaaaaatcgtgggttgcaaattttctattcttcgaaatgataatctagttgggatggaatctcattttctacattatcaaagcagctggggccggttaatgatgttcgagttgttgg

SEQ ID NO: 1186 - DNA, 282 bp, Glycine max
  Clone ID: 700554820H1
cactgtcttgtgttgtgttgtgtcatgggcattaactgccactacttcaatcaacataagtcaccatagcactttgatttttcctccgaaacaacacaagcagcaccttagaatccacaggtttcgatgcagtggaactaatccgaacaagagtcggaatcacagaacaatgcaattctcaagcttgcatggtatagttccgagcttcttggcattgcagcgtccgttttccgttcaccatctaatgaggaagttcctcctcagaggcttcttcagaccatt

SEQ ID NO: 1187 - DNA, 279 bp, Glycine max
  unsure (1)..(279): unsure at all n locations; Clone ID: 700554821H1
cattagcacttcttcttttcacactgccgctgcaacaatggcttcagagaagaaactttcgaacccaatgagggagataaaagtgcagaagctcgttctcaatatctctgttggcgagagtggagatcgtctcaccagagccgccaagggttggaacaacttagtggccaaaccccagtgttttccaaagcaaggtacactgttcgttcctttgggattagaagaatgagaagattgcatgctatgtcatgtcagaggtgacaaggcangcaattttgg

SEQ ID NO: 1188 - DNA, 282 bp, Glycine max
  unsure (1)..(282): unsure at all n locations; Clone ID: 700554822H1
gggactatgagaaggttggtaanaagatncgagcgatctggaaaatcaataagttctcctccagggttgttttttcaacatgcaggtcatagggatnaagttgttgacttccattggaatgcatatgatccatggacgattgttagtgtgnctgatgactgtganagtactggaggagggggaacgttgcagatatggcgcatgagtgatttgatctacagaccagaagatgaggttttggccgagctggagaaatcaaatctcatgttgtggcgtgtgctt

SEQ ID NO: 1189 - DNA, 282 bp, Glycine max
  Clone ID: 700554823H1
caaaaccctcttttttctctctcttgcaaaacctaattttcatttcttccctcaaatttcaaaatgcgtgagatccttcacatccagggtggccaatgcggcaaccagatcggcgccaagttctgggaggtggtttgcgcggagcacggatcgaccctaccggaaggtacggtggggactcggagttgcagctcgagaggatcaatgtctactacaacgaggccagttgcggtcggttcgtgccgcgcgcggttctcatggacctcgaaccgggcaccatgg

SEQ ID NO: 1190 - DNA, 283 bp, Glycine max
  unsure (1)..(283): unsure at all n locations; Clone ID: 700554824H1
cctgaagtttctttctttggctggtaataggttaaatggtttaattcctaccagcctggggcagttgtactctttgaaagtcttggacctttcgtcaaactctcttactggtgagattcccaaggctatngagaacatgagaaatctgatgatgttttgctcaacaacaacaatctttctggtcacattcctaatggtttggcacatgtcgctacactctcagcattcaatgtgtctttcaacaacttatctggatccttgccttcaaatagtggcttgatta

SEQ ID NO: 1191 - DNA, 288 bp, Glycine max
  unsure (1)..(288): unsure at all n locations; Clone ID: 700554825H1
aaacactatagcaatagaaacatttgcttttgaaaaacccctcactcttcatcactacactagctancccacatacaatgtacgaccaaatttaaggtgtttcgtgaattcacaagcgatgactcattcctaaaccaagttatccctgaaaaatcaccgaattccaagtgactctgtccctcgctagagactacgatggcaacaactcaaccaacggaaagttcattccttactgggacactgaaaaggtcactcccgaagtgataaaaaaattcaagaaaaaatacg

SEQ ID NO: 1192 - DNA, 284 bp, Glycine max
  Clone ID: 700554826H1
gaaccctcaaataaagaggttcttgaatcatcaaacaaggaatcacatgatgtggcaaactttgggattgtcactgatgaagatagagaagctgatcgtgaggctttagaaaagatttcaaagatgatagaggaaaggttgaagattagcctttgcctgcaccatctgctcagctgactggtgatggttctgtaaatttaacttcagaacaacctgttaaagcaagggatggagacttctgttgtggataccgagaagaatgaatctgctgaaaataaaaatga

SEQ ID NO: 1193 - DNA, 277 bp, Glycine max
  Clone ID: 700554829H1
gctctccaatacaaaataaccactcactgaatattcggtcgaagatgtccgccgccgaagaagctaaagttcccgccgtcgaaaagccggtggaggaggtgaaggcgccgaagcttgccaaggagaagaaacctaaggctccaaggaaaagaagccgaaacaggccaaaactgcttctcatcctccatatctccagatgattaaggacgctttgattgctctgaacgagaaaggaggatcgagtccatatgcgataggaagtacatggaggagaagc

SEQ ID NO: 1194 - DNA, 288 bp, Glycine max
  Clone ID: 700554830H1
tctcactcgcgccatcttagggtttctccttttgtttcgcaacatggttgccgctaagaaaactaagaagacccatgagagcatcaacaacaggctcgctcttgtcatgaagagtggcaaattcaccctcggttacaagaccgttctcaaattcttaggaactccaaaggaaaattgattatcattgctaacaactgcccccctttgagaaagtcagagattgaatactatgctatgttggcaaaggttggagttcatcattacaatgggaacaatgtggatttgggc

SEQ ID NO: 1195 - DNA, 287 bp, Glycine max
  unsure (1)..(287): unsure at all n locations; Clone ID: 700554831H1
ggagaatatgcaacagcaagagctgcatctgctgctggaacaatcatgactttgtcctcatgggctacttccagtgttgaagaggtggcttcaacaggacctggcattcgctttttccagctatatgtgtacaaggacaggaatgtggttntcagcttgtgagaagagctgaaagggctggattcaaagccattgcccttactgttgataccccaatactaggacgcagagaagctgatatcaagaacagattcacattgccgccatttttgacattgaagaacttt

SEQ ID NO: 1196 - DNA, 276 bp, Glycine max
  unsure (1)..(276): unsure at all n locations; Clone ID: 700554835H1
ggagnattgaggttggagttggagtgagtaacccagcacagcaatggcattgagactgagactgcnaagtgtcttcaattgggtcaccttttctgcagtnaggttcttctgcaagtgcagcatgctctgtttccaaanttggtttcatccaccangcttgcaactcaacaaaaattcacacccaatnaggcttttgttcgggctgctagaattgagtccaaaggtgttaccttgggtttcaggaccccacaattcagcttccggagcnccttancg

SEQ ID NO: 1197 - DNA, 281 bp, Glycine max
  Clone ID: 700554836H1
gtgaaactgtgatgtcctcctaaaaaactctatccatgtctatgatgtctctccacaaccgtggctgcattcaagtccctcacaatggcggaatcgtgccttctatccctcccttccctcttctacgccaaaaacaataccctttcttctcaattcccaccaagcccctcaacctccatcttccatgctccaactcttcgctctttcccctcaccaccaaaacaacgcgccactcttctctcctcacattcgtggctcagacatcggattgggccaaagaa

SEQ ID NO: 1198 - DNA, 280 bp, Glycine max
  unsure (1)..(280): unsure at all n locations; Clone ID: 700554837H1
ccagcaaaagcggttaagaggtctggctcaaaacctcaaagacaaagcctcggtgatcgccgcagcgctatccaccaagcgtcacctctcttccgtccgtgtccacgtgctccgcgccaccacgcacgccctcgcggcaccaccctcgaggaaacaatttctgctgtcctcgcggtcgggcacggcggctcccaccgtcatccacgcgcgtgcatcgacactactcatggaccgcctccacacnacgcgcatgacaccgtggcactcaaatgcctctaca

SEQ ID NO: 1199 - DNA, 245 bp, Glycine max
  unsure (1)..(245): unsure at all n locations; Clone ID: 700554838H1
ggntcagagccgaggctngcggttccggcgttggggnngntagggtnagggtttccgnganatgtngtatgcnccaggcattgatgaatctgttctcgctgtgttggaagcctttggccgcgatgctgatcgaatcgattccatcggngttatcggaagagaaggcaaagacggcttgctctggttccgcgacttcggaaaatatggctccggtgatttctccatggctgtcgttcaggccancc

SEQ ID NO: 1200 - DNA, 282 bp, Glycine max
  Clone ID: 700554839H1
agatcttgaaggtcatcagaaagaacttggttaagaagtgccttgagctcttctttgaaattgcagagaacaaggaggattacaacaagttctatgaggctttctccaagaacttgaagctaggtatccatgaggattcacagaacaaggaaagattgctgaattgctcaggtaccactccaccaagagtggtgatgaaatgacaagcctcaaggattatgtgaccaggatgaaggaaggtcagagtgacatctactacatcacaggtgaaagcaagaaggc

SEQ ID NO: 1201 - DNA, 281 bp, Glycine max
  unsure (1)..(281): unsure at all n locations; Clone ID: 700554840H1
attgaagttaaaagccttagccttccctacaactccaaacancnaagacatcatcatccatggctgcctccgtctccactgtcggagctgtcaacagagctcttttgaacctgaatggttctggagctggagcttcagctcccagttcgccttctttgggaccagcttgaagaaggttattgcctcaagggtccccaacagcaaggtttccggtggaagcttcaagattgttgctgtagaagagaagaaagagattgaagagacccagcagaccgacaagg

SEQ ID NO: 1202 - DNA, 281 bp, Glycine max
  unsure (1)..(281): unsure at all n locations; Clone ID: 700554841H1
gctctttacaatgatggcaattacattggctttcatggggatgatgaagaatatttggcaagggatgattgtagtggtgggtcgttagaaagcccgtgtggaatgggatatgttcgtgatngagatttggacttgtacactcgcaattggaattgaaaatgtncaagaaagtagtccccaactgctaccctacaaatgtcaaaaagcttttatcaactggcatccttgacggagctgtagtgaagtatatttacaatcctggaaaggttgagctacagggg

SEQ ID NO: 1203 - DNA, 281 bp, Glycine max
  unsure (1)..(281): unsure at all n locations; Clone ID: 700554842H1
ccctgnaagcaacttgcaatctccttcatacataccagtgtgtatgctgttgggaggatcgtgataaaatgttcaaggaagttgaagcgataatcaggaggcagattaatatgtccgttattcctagtgtccagccattccatgcaatgcatatccacttgacccaatgcttgctctggaaattagccgtaaatatgctgcacactgctcggtaattgcatctcgtttttctctcctccatcaaccatcctgctcctattccaatcaagcgcgagggaggt

SEQ ID NO: 1204 - DNA, 281 bp, Glycine max
  unsure (1)..(281): unsure at all n locations; Clone ID: 700554843H1
caatgatgagaagaggttgaatgccacttatataatcagtgttgcacggaagctcggttgttccatatttttgttacctgaggatattatggaggttaatcagaagatgattctcactcttgcanccagtataatgtattggagccgcaacaacagactgaggacatggattcattcccttcacctgccggcactgctactaccaccacgcctgaagcatccccggcaccttcggtatgtggtgaagatgaaagttcctctattggcggcgaattctccaa

SEQ ID NO: 1205 - DNA, 128 bp, Glycine max
  unsure (1)..(128): unsure at all n locations; Clone ID: 700554844H1
agagaacccataacagctagttaatggccctcgctttcacttcttcaatttccgcaccaacttccacnnggnccatcatcgnaacccaaacttccgcaaattgggtcaattaggattnnngagaggnc

SEQ ID NO: 1206 - DNA, 256 bp, Glycine max
  unsure (1)..(256): unsure at all n locations; Clone ID: 700554845H1
tagggtttctctctccgctagggttcccaatttctctcccccttcccaccaaaaacatggccaccgaaaccctagaagacaccaagcctcccctccaggacgacgaccgtgcgaaatcggagattcccgagaaagacgcttcctcggacacgccgcggcaaaatcccgggacgcgaatgccggcgacaaagacggagcntntgacaatcaggaagtagaagagaaagacgccgctgaggagaagaaagaagagatc

SEQ ID NO: 1207 - DNA, 284 bp, Glycine max
  Clone ID: 700554846H1
gcgtttcaagcaactcttcaagtttgttctcaccaggaacaactttggctgaagtgaataacatgtttgggacatcgtcgtcgtcacagggacagtggctgaattaccgataccccccagaagcaatatcatttacacatgccaatgttctatggctcatgggctgaagctagagcaagaagaaaacaaaggaaacttgtcgcatagcgtgagtctttgtacccaagtcacatggaatctgcaaggatattgagtgataataataattcggccttcgacaactc

SEQ ID NO: 1208 - DNA, 274 bp, Glycine max
  Clone ID: 700554847H1
cttttaaccagagccagtatcctcgattggttgctgaggactttttgccattgccttccaaagggcatactgacaaggatggatggtaccctcctggccatggagatgtctttccatcattattgaacagtggcaaacttatgcactattgtcacagggtaaagagtatgtatttgttgccaattcagataacttgggagctatagttgacttgaaaatcttaaatcattgatccagaacaagaatgaatactgtatggaggtgactcccaaaa

SEQ ID NO: 1209 - DNA, 264 bp, Glycine max
  unsure (1)..(264): unsure at all n locations; Clone ID: 700554848H1
agcnaggaaacagaaacctatttntattttctctcttcatatcacttagactgagactggatgcttctgtatccatcatattatatgatgattattgaattgattatgcgttcagatttcacttcagatcactttgacaggttgacttgtccggcaccaacttctggtattactattgtctgagttctcaggagttctttcacagaaggtagatgggttctagaatcccatctcataagcttagcaatggcctctacgtatcag

SEQ ID NO: 1210 - DNA, 276 bp, Glycine max
  Clone ID: 700554849H1
attgaagttgaagtcttgcccttctctcttcaactccaaacacaagacatcatcatccatggctgcctccgtctccactgtcggagctgtcaacagagctcttttgaacctgaatgggtctggacctggggtttcagctcccagtcatccttctttgggagcagcttgaagaaggttattggctcaagggtccccaacacaaagatttcctctggaagcttcaagattgttgctgtagaagagaagaaagagattgaagagacccagcagaccgac

SEQ ID NO: 1211 - DNA, 277 bp, Glycine max
  unsure (1)..(277): unsure at all n locations; Clone ID: 700554850H1
aaaaaaaaagaatacaaactctanncaaaaaaggaggnaatggggttgatcaaagcagcaattggagatggagttttancatcaatgtgggttttcataatctcaacattgaggattgtcacaactgaggtggcacttttccttgcctccaacctctttcacttgcaggcctcataatcagcaccatcctaaacagtttctatgtcctcaccataagcttcattggaagaatcttaggtggtgcaaacttcaacccttcaacaagtctttcattcta

SEQ ID NO: 1212 - DNA, 275 bp, Glycine max
  Clone ID: 700554851H1
atcgagataactagaaacagtgtgatgaaaatgaaggtccttgttttcttcgttgctacaattttggtagcatggcaatgccatgcgtacgatatgttccctctccgaatgaacactggctatggtgcccgtactccggaggtaaatgcgcaagttggaggcttgctgtggaagcacacaacatctttggctttgagaccattcctgaagagtgcgttgaagcaacaaaggaatacatccatggcgaacaatatagatcagactccaaaacagtt

SEQ ID NO: 1213 - DNA, 275 bp, Glycine max
  Clone ID: 700554852H1
agcgtgctagggttcatcaggtgttgtagagagacacatctattgacactgtgaattactcaagagggctcgacaatcccacaaagtagaaaaagaggttatgttatggcgggcaaaggtgttagttcggtggctaaggcggtacagaatatcagtatccttggcgtgagaagttggggaaatataaggatgagcttgccaagggtgtgtggggatactgggagctgggggcatggaagccgctgagtatcagtgctcggcatcgtgctagaatc

SEQ ID NO: 1214 - DNA, 171 bp, Glycine max
  unsure (1)..(171): unsure at all n locations; Clone ID: 700554854H1
tccacttccacattgcatctggtnncnttnntcttctactatagctatctttcattctctcnctagctacacacaacctctgnatattctccgcgcgcgcttacgatcgatgctatnatagtgttccctanctacctnatggcncnctcttcatcncaatgcaaatgcttc

SEQ ID NO: 1215 - DNA, 49 bp, Glycine max
  unsure (1)..(49): unsure at all n locations; Clone ID: 700554855H1
tcctgaattgtgttgtntngtncagacatggcccntcagcaacccnagc

SEQ ID NO: 1216 - DNA, 134 bp, Glycine max
  unsure (1)..(134): unsure at all n locations; Clone ID: 700554856H1
attggtttgttagaagagtccangaagaagtctgtattanttgtactgtaattgtaaggncgactatgaataaattgttaataaagggtattcattacccaccttcttttctttacataaaataaacataaata

SEQ ID NO: 1217 - DNA, 271 bp, Glycine max
  unsure (1)..(271): unsure at all n locations; Clone ID: 700554857H1
cctatcatggcagcctactaccccaacaacgtcaccactgatcacattcaacannacctggatgagaacaagtccttgatcctgaagattgttgaaagccagaattctggcaagcncagcgagtgtgcagagaaccatcaaggctgcagagaaatctcatgtacctagctgcaatagctgattctcaaccccaaccatctccaatgcctggtcagtatccttctagtggacttatgcagcagggagcacatacatgcaggctcagcaggct

SEQ ID NO: 1218 - DNA, 278 bp, Glycine max
  Clone ID: 700554858H1
gggaaacccactgggataacagtgctacaaagaattggggtaggacttttcttgtcaatccttaacatggttgtgtcagcacttgtggaggccaaaagggttggtgttgcaaaagagagtggcctaattgatgacccaaaagcaggttaccaatcagcatttggtggctgcttcctcagtacatgatcactgggatctctgatgcattcacaattgtggggctacaagagttgttttatgaccaaatgcctgaggcacttaggagtttgggggctgca

SEQ ID NO: 1219 - DNA, 279 bp, Glycine max
  Clone ID: 700554860H1
cggccaaggaggaagaaggcgccgaatctgccatggatatgagccatgaatcaagtgtgagcatgcaagcagcctaatggttgtaaattcgtaatgtatgataatcatgtagataacaattagttatacccttggatcagtgcatggatgagattgagaacaggttattttgtaagcacaatatgagaatcttttttgccggtttatcctcaagcgtagaccttttagttatttcttattatgtagccattgggtggcagattacctttttgtcattgt

SEQ ID NO: 1220 - DNA, 282 bp, Glycine max
  Clone ID: 700554861H1
cgttgatgaaaactactctctaggaaaatcactcaccaccaaccaaatcttaaaactcgcgtccaagggtccacagagaaacgccatcaacatcgttctaacttctgctgaagtggcagtggaggggttctgttcgagtaggtgcggacacacgggtcctccgtgggggcgcgtgtgaacggtaagaggtataagttcgcctacatgtgggtgggtaactcagagacacagtgccctggtcaatgcgcgtggccgttccaccaacccatttacggtccccag

SEQ ID NO: 1221 - DNA, 282 bp, Glycine max
  Clone ID: 700554862H1
cagaagtgaccccaatatacttagccatatctttacttcccaaaacttgctctacaatgagtttccttcgttcttttgcaagaaacaaggatatatcaaaagtaggacgcagaggtatccattgcatgcagaaactatgtgcagaaaaatatctcctgattcactagagaaggcccaaaatcgtgtgatagatgctgcactcacacttgttcgagaaaatacaaggcttaagaaagaatcgtgcatagtttgggaggtgctgtggcaattcaactcttcttg

SEQ ID NO: 1222 - DNA, 284 bp, Glycine max
  unsure (1)..(284): unsure at all n locations; Clone ID: 700554864H1
gcagaaactggtggaagcttttgatttgttccgagagatgatgcgcaggggtctcccgccctgatgaggttacttatactagtttgattaatgcttattgtgttgatggggagttgagtaaggctcttcgtttgcatgatgaaatggtgcagaggggttttttgcctgataatgttacctatagtgtgcttattaatggacttaataagaaagctaggacaaaagtagcaaagaggctcttctgaagttgtnttatgaggagtctgtaccagatgacgtaacat

SEQ ID NO: 1223 - DNA, 272 bp, Glycine max
  unsure (1)..(272): unsure at all n locations; Clone ID: 700554866H1
gggactttcggaccctgaaggaacaggagggttcattgagccgaaatggctagcncatggtgagataatcaatggtcgttatgcaatgttgggtgcagttggtgcaatagcacctgaaattctaggcaaggctggtctgatcctcaggagacagcactcccatggttcagaaccggtgtgttcccacctgcaggaacctacaactactgggcagactcctacacactgttcgtgtttgagatggcatgatgggatttgcagagcacagaaga

SEQ ID NO: 1224 - DNA, 271 bp, Glycine max
  unsure (1)..(271): unsure at all n locations; Clone ID: 700554867H1
caaacaaccttctttctntttctgtgagcctttctttcangttcttaacttgatcagtgtgcagtgtccaaatcataagggnagttgcaaattgcaatggctaagcatgatgttgagggtggttccttctctgcaaaggataccatgatcctcctccagcaccgttgattgatgctgaggaactcacacagtggtccttctacagggctttgattgctgagttcatgccacaatgctcttcctttacatcacagtgctcactgtgattggt

SEQ ID NO: 1225 - DNA, 277 bp, Glycine max
  unsure (1)..(277): unsure at all n locations; Clone ID: 700554871H1
gcgttggccatggcaaacatgattgtggcttccaccaaacctctggttccagtctgcaccagttcccgttcccccacacccaaagtccccatnctccaaatttcactccccaaagccccaaccttgaaactgaaactcccgattcaaagccccagatgctgtccctccttggagggatagcaccactggtcttggccagaccctccctcgcagaagaaattgagaaagcagcactctttgacttcaacctcacccttcccataataatggtggagtt

SEQ ID NO: 1226 - DNA, 277 bp, Glycine max
  Clone ID: 700554872H1
cgttgatgaaaactactctctaggaaaatcactcaccaccaaccaaatcttaaaactcgcgtccaagggtccacagagaaacgccatcaacatcgttctaacttctgctgaagtggcagtggaggggttctgttcgagtaggtgggaacacacgggtcctccgtgggggcgcgtgtgaacggtaagaggtataagttcgcctacatgtgggtgggtaactcagagacacagtgccctggtcaatgcgcgtggccgttccaccaacccatttacggtc

SEQ ID NO: 1227 - DNA, 280 bp, Glycine max
  unsure (1)..(280): unsure at all n locations; Clone ID: 700554873H1
gattgagnacttgatgccanatcccaatatggggtgattgcatgtgacataaacatgttgnacaagtagatctgaaatggtgttagacggttggncattcctattgccattatngtattttggattagaactnnnatttncctttntgcttgaataatgagatcataccatatccaatctcattattcaagcaccanagaaaatgagattggatatggtatgatctgtgcttagaaattatnattagacatggggatgccaanttctgtganggaatgtc

SEQ ID NO: 1228 - DNA, 277 bp, Glycine max
  Clone ID: 700554875H1
ggcaaaccggttaggatcagtgcaaagagaagaatgggacttggcttgtttttctcttttatccacttggtaacttcggctattgtcgaatccgtaaggcgaaggagagcaatcaaggagggatatcttaacaatgccaatgggtgttgcatatgtctgcaatgtggcttttcccacaactttgcttgggtggaatagctgaagcattcaatgcaataggccaaaatgagttctattacacagagtttcctaggaccatgtccagtgttgctgcttc

SEQ ID NO: 1229 - DNA, 280 bp, Glycine max
  unsure (1)..(280): unsure at all n locations; Clone ID: 700554876H1
cttcagaggactacacgtcctcgccgtcaaagggtcatgtgccancacctttgtagggctacatgccctcaccttcagaggactacacgtcctcacctttagaggactacacgtcctcgccatcagaggactacatgttccccatttcaaagggggccatgccctcaccttcagaggattgcacgtccttgccatcataggactacacgccctcgccatcagaggactgcatgtcctcaccttcgtagggctgcacgccctcacctttagaggaccacac

SEQ ID NO: 1230 - DNA, 281 bp, Glycine max
  unsure (1)..(281): unsure at all n locations; Clone ID: 700554878H1
ggcatagcatgctacactcgcgggcctttcttgcctagtgtntcttccaagcactctccaccttccatttctccatcttttggcttgaggagtctgaaatcaagctctttatttggagaatcgctaagagtggcctccaaatcacaataaaggtttcaaagacaaagaatacttcactcgtgaccagatgtgaaattggtgacagtctcgaagaattcctcacaaaagcaacaccagatnaggggntgatcaggttgttggtgtccatgggagaagcattg

SEQ ID NO: 1231 - DNA, 281 bp, Glycine max
  Clone ID: 700554879H1
gaagaatcagactagagcggatttctgttcctcacttaggggcattgaaaaatcttggaaagttatccctctacatgtgtagtaacataagtcaggcttttgaaaatggtaccatcacagttttggattcatttccaaaactatagatttgaacattgactattgcaaggatatggtgaaattgcctactgggatctgtgatattgtctcactaaagaagctcagtattactaattgtcacaagcttagttctctgccccaagaaattggacagttgttga

SEQ ID NO: 1232 - DNA, 121 bp, Glycine max
  unsure (1)..(121): unsure at all n locations; Clone ID: 700554880H1
gagcctcccaaagtnagtgantagtgagtgagtgagtngcagctagcatggaaattactgccatggctncttnagctacttcctccaggaccttctccttccaactccttccacttctcaa

SEQ ID NO: 1233 - DNA, 272 bp, Glycine max
  unsure (1)..(272): unsure at all n locations; Clone ID: 700554881H1
tacaactacaaaggttgctgtaggagataagatattgaagtagtgctaagtgnctaacacctgcagtgaacaatggcctctgcatcagcatctcttctcaagtcttcacttgttcttgacaagtctgagtgggtgaaggacaaacacttcgccaaccttctgctgcatcagttgtgagatgcaaccccaccaccccatcaggcctcaccatcagagctggttcctatgctgatgagctcgttaagaccgcgaaaacagtggcttcaccaggg

SEQ ID NO: 1234 - DNA, 203 bp, Glycine max
  unsure (1)..(203): unsure at all n locations; Clone ID: 700554882H1
ctttcactcccaagtgagaagggttggaacaactctatgattgcaagccttggagaaacattgggaaactgtttaacttnagcatgnnacngntcatatgtcnttaggggggngttttgatgtnggtgaaagctgtaaaatggtacttctattgtcatgcacagattgattattcaatgtacaaatacctatttaagtttaaa

SEQ ID NO: 1235 - DNA, 272 bp, Glycine max
  Clone ID: 700554883H1
gaatggttatcgttttgaagaagcttttgatggcagtgctctgagactgaatcattgaaactagattcaatttattcgctcctttcttcaccaaaattgaattgaatggatgctatcagaaagcaagcctccaagcttcagaacaggtcgctcgccagcagcaggctgttctgaagcagtttgggggtggcggttatggaggttcagataatgtggttactgatggagtggagctccagctacaccagaaacttgagaaactttatatatcg

SEQ ID NO: 1236 - DNA, 263 bp, Glycine max
  unsure (1)..(263): unsure at all n locations; Clone ID: 700554884H1
tgcaattgaagttaaaagccttagccttncctacaactccaaacatccagaaatcatcatcccatgggctgnctccgtctccactgtcggagctgtcaacagagctcttttgaacctgaatggttctggagctgagcttcagctcccagttcagccttctttgggaccagcttgaagaaggttattgcctcaagggtccccaacagcnnggtttccggtggaagttcaagatgttgcngtagaagagaagaaagagattgaag

SEQ ID NO: 1237 - DNA, 275 bp, Glycine max
  unsure (1)..(275): unsure at all n locations; Clone ID: 700554885H1
tgggtggagatgatagttggtcgccatgtgtccacgaacagtatttgattcctcctgtgccatactcattctctgttaggctgtgcccagtaaatccagccacttctggtcatgacatctacaaatcccagtttcaaaactttgatttcttggatcacatgacttgttctattcaagaataaacatcttgtagaagaccgaagaccgaagaccaaagactggtgtgcttactaaggactacaaaganacttggaagctattggtgtaaagatccc

SEQ ID NO: 1238 - DNA, 274 bp, Glycine max
  Clone ID: 700554887H1
aatattttctcttccctctttctttctctcaaatagaaggtgcttagtagtatggaagacctggattcggtgttcgttaccacgagggagaacacgagttaaggcagaaacttatgaatgccagacatgaacttgagaaatgaaaaatgtcaaggcagaattgcttgatctgttgaacatggcataccaagagagggatgaagcaaggtgtcagttacagaagctgatgaatccattcatgccctctaatccaacccatttgcaaaacgtgttt

SEQ ID NO: 1239 - DNA, 275 bp, Glycine max
  Clone ID: 700554888H1
caagaactctccaaggatcctccttcccacgagattctttggtgggaaaaatccaagaggtttgaaatttgaaggcagggaagatggattatttcaatgcaccaggaagaaaccatctctttgttccagggccggttaacatccggaccagatcatccgggccatgaacagaaacaatgaggactaccgttctccagcaattccagctatgacaaaaactttgcttgaggatgtcaagaagattttcaagaccatactggaaccccatttctcat

SEQ ID NO: 1240 - DNA, 271 bp, Glycine max
  unsure (1)..(271): unsure at all n locations; Clone ID: 700554890H1
gcaagtgaagcaatggctcaaaccatgttgctcatgtctagtgtctctagcagttattccgtggatttgaagaaagaccttttcctccaattgcagagtcaaagtttaaggcctaagttctctcaactctcattcaacccattccaccatcaacttcttcnttttctttcaccccgtacattcacaacctgggctctcttcaaatctaagacaaaagcgctcctgtaagactaaggttacaagccaaagcaaaggtgaagatggtatcttg

SEQ ID NO: 1241 - DNA, 267 bp, Glycine max
  Clone ID: 700554891H1
taaaaacctagtattttatctggaggcatgtgaatctgggagtatctttgaaggtcttcttcccgaagatatcaatatttatgcaaccacagcttccaatgcagaagaaagtagttggggaacatattgccctgggagtatcctagtcctcccccagaatattcaacctgcttgggtgatctgtacagtgttgcttggatggaagacagtgacagacacaatttacgaacagaaactctgcatcaacaatataaattggttaaagag

SEQ ID NO: 1242 - DNA, 278 bp, Glycine max
  Clone ID: 700554892H1
cctaagcccaaggcacctgtagctggtgccccacaaggccttaccgtttaatttttaggttattagggctacggcaaagaacagttttgtgcagaaaattgaaagagcggagagaaatataccgatgatttcgttcgtttcttgccaagaaagtaatacaccatgaattgctccagcattttcaacatcagtcaatctacatgcaagcagacgatgtgaatcctccctccatcagatttgagaaaataatgggtactcgttgaagttgtttatcttct

SEQ ID NO: 1243 - DNA, 279 bp, Glycine max
  unsure (1)..(279): unsure at all n locations; Clone ID: 700554893H1
gtgaaaaagcaaaacgtgagagcatggattgaatgacgatgggatggtcaacactgaggattgttccaagtgtacacaatttgtggatcagagatgggatgagaatgataatgaggagattcgcaatcgatttgtgactggcatttggcaaaagctgcacttagaaatgcattaccagcagctaatactgaagaggaaaatgatgatgtctatggtgactttgaagatttggaaacaggagaaaagcatgagnntcatcagacggatgatgctttggct

SEQ ID NO: 1244 - DNA, 278 bp, Glycine max
  Clone ID: 700554894H1
cgagataactagaaacagtgtgatgaaaatgaaggtccttgttttcttcgttgctacaattttggtagcatggcaatgccatgcgtacgatatgttccctctccgaatgaacactggctatggtgcccgtactccggagtgaatgcgcaagttggaggcttgctgtggaagcacacaacatctttggctttgagaccattcctgaagagtgcgttgaagcaacaaaggaatacatccatggcgaacaatatagatcagactccaaaacagttaaccaa

SEQ ID NO: 1245 - DNA, 282 bp, Glycine max
  unsure (1)..(282): unsure at all n locations; Clone ID: 700554895H1
gctatcacagatagaatcagaggaaaccctaaaccaaatgctatgcaccctttggtccatcgtaaaacgggtcttcccctctccggacaagtcccatttccaatccctcctccacctcccttcncccctcccatctcgacccgtttagcgtgcctccgttccctcgtcagaaaatgcgcgcaccagaacctcgcccgcgacgaccttctcagactgtttccccgcgatcttccgattcagttgcaaacgaatttggtatcagcgttgcagagaacagagatt

SEQ ID NO: 1246 - DNA, 281 bp, Glycine max
  Clone ID: 700554896H1
cttaatcgatcatcacttcacttcactaatacatcatggcagacgagacccagaacaagtatgagagctctgaggttgaggtccaggatcgtggtgtttttgactttctcggtaagaaaaaggatgaagaagacaagcctcatctcaggaggaggtcatcgccaccgagtttcaaaaagtcactgtctcagaccaaggagagaacagcacagcctcttagaaaagcttcaccgatctgacagcagctctagctcttcaagtgaggaggaaggagaagatgg

SEQ ID NO: 1247 - DNA, 296 bp, Glycine max
  Clone ID: 700554901H1
aaagggtttccgatcaccgaacggatcaaggaggatgaagatagcggtggaagggtgcatgcacggggacctggacaatgtctacagaacccttcaacagttggagaaatctgaaaacacgaaaatcgaccttctcctctgctgcggcgatttccaaccgtgaggaacgagcatgacttgaagagcctgaacgtccctctcaaataccgctccatgaactccttctggaagtactattccggcgccgaggttgccccctaccccaccatcttcatcggcggcaaccacgaagcttc

SEQ ID NO: 1248 - DNA, 292 bp, Glycine max
  unsure (1)..(292): unsure at all n locations; Clone ID: 700554903H1
cgtgaattcacaagcgatgactcattcctaaaccaagttatccctgaaaacatcaccgaattccaagtgactctgtccctcgctagagactacgatggcaacaactcaaccaacggaaagttcattccttactgggacactgaaaaggtcactccgaagtgataaaaaaattcaagaaaaaatacgaacccaccgcactgagggttaaggttcttgtcagcattggaaacaaaaacaaacaatttcctttcaccattggctcggactcgaacagcgaanatgggtctccgag

SEQ ID NO: 1249 - DNA, 291 bp, Glycine max
  unsure (1)..(291): unsure at all n locations; Clone ID: 700554905H1
cttttcttcccattttgcnccttcctcctttccttgtttccgaagngggccaaccacatatgctaaacaaggaaactaaattctaacctccttcagatctacaccacccttctcttttttttccagtttcataaattctacaccatgggcacggggttctacggccacaagattgtttcacccaccgcatcgctgttccaccggcggggttttcccggagaagaacctctgggacacacaacaacaattacttcaggggcacgcggaagccggttacccgacccgaacaga

SEQ ID NO: 1250 - DNA, 255 bp, Glycine max
  unsure (1)..(255): unsure at all n locations; Clone ID: 700554906H1
gatggcaaatgaactacccgtcaaagcttttggttgggctgcttcagacacttctggcacccttgccccttttcatttctccagaagggaaaatggcgtcgatgacgtcactctcaagttctcttctgcggggtttgccactctgatctccacactctcaaaaacgactggggtttcaccacctanncctgtcgttcctgggcatgaaattgttggtgttgtgacagaagttggaaacaatgtgaaaaacttcaa

SEQ ID NO: 1251 - DNA, 289 bp, Glycine max
  unsure (1)..(289): unsure at all n locations; Clone ID: 700554907H1
gtgaattcacaagcgatgactcattcctaaaccaagttatccctgaaaacatcaccgaattccaagtgactctgtccctcgctagagactacgatggcaacaactcaaccaacggaaagttcattccttactgggacactgaaaaggtcactccgaagtgataaaaaaattcaagaaaaaatacgaacccaccgcactgagggttaaggttcttgtcagcattggaaacaaaaacaaacaatttcctttcaccattggctcggactcgaacagcgaanatgggtctccg

SEQ ID NO: 1252 - DNA, 289 bp, Glycine max
  unsure (1)..(289): unsure at all n locations; Clone ID: 700554908H1
aagctagtttatcgtgaggngaatatgaagttgtttgttttctttgttgctgtcagtagttttggtagcatggccatgccatggcgcaggctaccaaaggttccctctccgaatgaaaactggctatggtgagcgttcttcggaggtaaaatggcaagttttaggcttgctgtggaagcacacaanatccgagcnttaaaaccattcctgaagagtgcgttgaaccaacaaaggactanattaatggcgaacaatttagatcagactctaaaacagttaaccaacaagc

SEQ ID NO: 1253 - DNA, 289 bp, Glycine max
  Clone ID: 700554909H1
aaactcgttgcctctgaactttcactttcactgaatttcagcacaaaaagattgcaaaagcgctccctacctctgttgggtctgtttcaaatctgcaatttgcatacttgtggagccataagcttgctatgtatcattgaataattctactggaacatccatctcaaagacaggaacatttggatcttgaattggaggtgttactaatagaagcatggctaagagtgtggaaggtataaaagggggaggaggatccatcaagctaggtaccactggaacaatcagttcc

SEQ ID NO: 1254 - DNA, 287 bp, Glycine max
  unsure (1)..(287): unsure at all n locations; Clone ID: 700554910H1
ctcctcaatccacataccagtgccagagggagattaaagaatcnnctgccgccatcaaaattcaaactgcatttcggggttacctggcaaagaaggctttgagggcattgaagggaatagtgaagcttcaagctatcattcgtggccgagcataagacgccaagctatgagtactcttaagtgcttacagtccattgtgagtatccagtcacaggtctgtgcaaggaggctccaaatggttgaagggagatgtgattactctgaaaatgaagacatgcaagattcta

SEQ ID NO: 1255 - DNA, 285 bp, Glycine max
  unsure (1)..(285): unsure at all n locations; Clone ID: 700554911H1
tttgttgtgagctataagctagtttatcgtgaggngaatatgaagttgtttgttttctttgttgctgcagtagttttggtagcatggccatgccatggcgcaggctaccaaaggttccctctccgaatgaaaactggctatggtgagcgtcttcggaggtacaatgcgcaagttttaggcttgctgtggaagcacacaacatccgagcntttaaaaccattcctgaagagtgcgttgaaccaacaaaggactacattaatggcgaacaatttagatcagactcta

SEQ ID NO: 1256 - DNA, 285 bp, Glycine max
  Clone ID: 700554912H1
caagtacaagaacaagaagaaacaatgtcttgctccaatctcacaatgttggtgtcctcaaaaccttccctttccgatccctccaatctctccttccgctctgtcctcaacccttttcagctcccttcacaaaacccaacttcatgcactcttcacgctcctcaaccacccaaattcagtgtggtctgagagaactcagaacccgcattgattccgtgaagaacactcagaaaatcaccgaggctatgaagcttgtggctgcagccaaagtgagaagagctcaag

SEQ ID NO: 1257 - DNA, 284 bp, Glycine max
  unsure (1)..(284): unsure at all n locations; Clone ID: 700554913H1
gttgcttggnggggataagattaaagattcaacaatggcctctgcttctgctantcttctcaagtcatctcctgttcttgacaagtgcgagtnggtcaaaggccagacccttcgccaacctctcgtgagatgtaacccttcctcagnanagctctcaccancaaagctgcttcctatgctgacgagctcgtcaaaanngcnaaaacagtggcctcaccggggcgtggtattttggcgatggatgagtcaaatgcaacctgcgggangcgtttggcatctattgg

SEQ ID NO: 1258 - DNA, 287 bp, Glycine max
  unsure (1)..(287): unsure at all n locations; Clone ID: 700554914H1
atgcattccagccctttgcttcttnaggaacccattangatggcatccatccttgagccatccaagcctactttttttccgggctatgacgaaaattgttggcacacttggtccaaagtcacgatcagttgatataatttcccattgccttatgcaggaatgtctgtggcaaggtttgacttttcatggggtgatccagaataccatcaagagacattggaaaatttgagagttgctatcaaaagtaccaagaaactctgtgcggttatgctagatactgtgggtcc

SEQ ID NO: 1259 - DNA, 290 bp, Glycine max
  unsure (1)..(290): unsure at all n locations; Clone ID: 700554915H1
gcgtgtgttactcctcactccatctcagtctcatcactctccaaccacaatggctgtcttggncngcgccgcctnccgctcgcatcattccctccgtctcactctccanctcttctcgctccttcttctccttatcatcctcttccaaactcaatgcttgcnctcctctcctcgcatttcgcacctctttctcaatcagcaaagagcggaggttcgcgtttcgagtggaggatacggaacggtatcggcgccgaagtccgttgcgtctgatcctgatcagttgaagagcg

SEQ ID NO: 1260 - DNA, 290 bp, Glycine max
  Clone ID: 700554916H1
tttaggccttagtgagaaggataacgccatttggttttggcttggaatacgtcatccactatcaatcaactgggctttgaaatggtgaaggagaccgaatactatgacgtgctgggtgtcagccctacggcatccgaagccgagattaagaagcttattacattaaggcacggcaagtgcatccagataaaaacccaaatgaccctcttgctgcacaaaattttcaggttttaggtgaggcttaccaagttctgagtgacccagctcaaagacaagcttatgatgctcat

SEQ ID NO: 1261 - DNA, 289 bp, Glycine max
  unsure (1)..(289): unsure at all n locations; Clone ID: 700554918H1
actttatgtttacgagctctgatgaaccagatggttatgcttttgatcccgtccttcgganatggtatcggtatcgcattgaacttccatgcattggaacttctaattggttcattgcttcatcatatggcatggtctgcttcatggacaatanagcagaagtgaaatatgcatctgcaacccaattaccaaaacctacaggaagcttgaggagcctccaggtttganagtttctgattacagtgcattagcaatctcagtgaacagggaatctcactgttatactgtg

SEQ ID NO: 1262 - DNA, 287 bp, Glycine max
  unsure (1)..(287): unsure at all n locations; Clone ID: 700554919H1
tgctggangcccgtggcaatttattggccttttgtctctctttgacccacctaggcatgatagtgcagaaacaatacggagggcactaaaccttggagtcaatgtcaaaatgattacaggggatcagctagctataggaaaggaaacaggngtcgcttgggaatgggtaccaacatgtatccttcatcagctttacttgggcaggacaaggatgaatccattgttgccttgccaattgatgaactaatagaaaaggctgatggatttgctggtgtatttcctgagca

SEQ ID NO: 1263 - DNA, 289 bp, Glycine max
  unsure (1)..(289): unsure at all n locations; Clone ID: 700554920H1
anaagaaagaagaaaacaatggacttgtacggttccttttccaccccttcagattgcttacacatcgatgattttctagatttctccaacatcaccaccancaccaccgacacccaccaccantttcctccgccgcaaaactctccatcaattcccacgatcccaatttcttcctcaatttcccttccgttccgagcgacgaagcagtggagctggagtggctctcccagttcgtgaacgacgaggcgacgtcgtttcacaacatcccaccacccgcatccattggatc

SEQ ID NO: 1264 - DNA, 217 bp, Glycine max
  unsure (1)..(217): unsure at all n locations; Clone ID: 700554921H1
tgattgaagaagatgccgatcagaaacatcgccatcggaaggcctgaagaggctactcaccccgacacgttgaaggcgggttggctgagttcatctccaccttgatcttcgtgttcgccggttcaggttccggcatcgcctanaacaagctcaccgacaacggcgccgccantcccgccggcctcatctccgcttccatcgcccatgctttcgccct

SEQ ID NO: 1265 - DNA, 285 bp, Glycine max
  unsure (1)..(285): unsure at all n locations; Clone ID: 700554923H1
caaaacgcttcgtcgtttgtggttactgagtcctgagtgatcttgtcatccgacctttgccatgacaggtgcgcttgcttggcaggtcaaaatatgttaataaaaaaagttttattggtttagggagagatcgcacgggagttgcccggntctctctctcgtgtggtgtgtggtgtttgctgtgctctcctnttcgttatgccttttattattacctatctgtcgctccactccgtattacgactctggatcagagggatacatcagaggattcgctccaactcc

SEQ ID NO: 1266 - DNA, 278 bp, Glycine max
  Clone ID: 700554924H1
ccaccattctagatatcagagaactttgcagctctcttaggtttttaaaaaacaccacgcaaacagcaagatggccacttccgacagtaacatgctaactaaattatgttccagtttatgtgatgctcccactcggagttgtcatgttgacaatgtttttgaagacccagatggccttaaagaacagctcttgcagcttcgagctgcgggtgttgacggggttatggttgatgtgtggtgggggatcatagaactgaaggggcctaagcagtatgatt

SEQ ID NO: 1267 - DNA, 284 bp, Glycine max
  unsure (1)..(284): unsure at all n locations; Clone ID: 700554925H1
ctctctctctctctgngncctcctctgagctcagatcctctgcanngaagcccttctgctcccgctacacccccaatttattctccttctcacttagggttttcatctccatttccgaacctggttaaccggttcanattttctgttttcngctgaattttgaagttgcagctcgatcttcgatctggggtttcgggtgangtgacacggtaggtagccggtgacgttgcttggtgttgttggatctgttcccagaaaannaagaagggacaaggnaaganaga

SEQ ID NO: 1268 - DNA, 285 bp, Glycine max
  unsure (1)..(285): unsure at all n locations; Clone ID: 700554927H1
ttccagtganagaaaggcagngatggaagaaganttcgacatccccggcggcgaggaaatggatctcggcgaagacgaggtcggcgaggagagggagatcggctctggcggcctcaagaagaagctcctcaaggaaggtcaaggctgcnnncccccgaagtcggtgacgaagtccaagttcattacacggngactttgctcgacgggactaagttcgattcgagccgcgacagggattctcccttcagcttcacgctcggacaagggcaagtaattaaaggatgg

SEQ ID NO: 1269 - DNA, 283 bp, Glycine max
  unsure (1)..(283): unsure at all n locations; Clone ID: 700554928H1
tggagggaaaaaatgaagcagagaattatcaaattcgttctagaaaagccaaacgtgtagtaattttgactaataaatctaaattttttaagaagtacgatacttataatcctacaggagatactgataacgctgaaaaaaaaaaaatgaattggctttaatangttattcccaacaatcggnttttcggcgagacataatcaaaggntctatangtgctcaaaggngtaaaacagttacttggaaatttttncaaaaaagggtgcattcccccctttttttg

SEQ ID NO: 1270 - DNA, 282 bp, Glycine max
  Clone ID: 700554929H1
tcatcatacgtgggcaagaaaacaatcttatccacatggacaaatccatggatataggatgtcactttgggcagaacatacaggaacaattgaagagtgctttttgcaacccgagagccttgaatgtgtaagaagggttaaagcaatggtgaaatgaactggaaacaattttcagctaaggaagcaacagagatgaaagggcatctactgaaatacccggtagaagttgatcgaaatggcaaggttagaccccttcaggactgtgaagagttcccggatgtg

SEQ ID NO: 1271 - DNA, 286 bp, Glycine max
  unsure (1)..(286): unsure at all n locations; Clone ID: 700554930H1
tgcaatctcaatgtcaganacttccgatcagattgataatgttgctgattcagtagttccttcagtgctatgtgggnccaatttgcccaattactcgagcaaggagataatgttgatatgctacctctcactgatgaagaatacatccacatgccatttctgaaggaaaaaggttccgagattcacttgaaattattgctcttcttaaaaaagcttatgaatcctanagcagtatgaaaattcagaggatgagctctttttgtgcattccagatgtctaaagaata

SEQ ID NO: 1272 - DNA, 289 bp, Glycine max
  unsure (1)..(289): unsure at all n locations; Clone ID: 700554932H1
ctccanctgatgatggatccggacgatttcttgaggctaaagaatcaactctcggtgaaatcctcgagcggcgaaacggcatcgttctgcttcagatcgaatgagttagtggaactgacgaagatgtgcagagatctgaggcacaaggtgcgnanatattggaggtggaggtggatccgaagggaggaccgatgattcaagaggcggcgatgaagctctacgtttcgaagagcgagttcgagaaggttcattgttgcaggcgatgcaggcgattnaacgcggcgatgaa

SEQ ID NO: 1273 - DNA, 289 bp, Glycine max
  unsure (1)..(289): unsure at all n locations; Clone ID: 700554933H1
atgcataataattgcatataaaaactaaacagtattgttgattaggtgtgacagaacagcagaagggaagaagatggacttactggagttatgggcaattttcggccccggcgtcnccggcgctgtcttcggcgccggatggtggatctggttgacgcggtcgtctgcagcttggtcaccgttcccttccttcactaccttcccggaattttcgcatcttttgcggctttgatgttcaattgcgttagaaaagaagacatcgattattctccatatgacgaaggcgagt

SEQ ID NO: 1274 - DNA, 286 bp, Glycine max
  unsure (1)..(286): unsure at all n locations; Clone ID: 700554935H1
gatttctgtttctctgtcttcattttagtttttacggctagaagaatgtccagctcatcggaatatttggtattttccggccancanccggcgaactctccggcggaaaagtccactttctctcagacttgtagtctattgagccaatagtcaaggaaaagggtaccttcggagaccttaccctcgggatgacttgcactgccgaaacaaacggttcccctgagacatcgtgtcantctgcaacaaccatggagttgtttcccacgatcatcacgcaacggaaccc

SEQ ID NO: 1275 - DNA, 286 bp, Glycine max
  unsure (1)..(286): unsure at all n locations; Clone ID: 700554937H1
caaacatccatcatcattattattttactccgaacgagttgacaccgattccantcactcaancatgngccgattcaggcgttttgagctcatagaacaaccacctttcttccactcctgctactctttcccttccttcgtcctccaagctcactctctctcgacctcgacctcttgccanttcccagccacttcgacgctttcncagatctggtgcacgcnccgtcgttcgcttaccggcgcgtggagaggcatctcgagaatgagttgcgtttgcagagcctct

SEQ ID NO: 1276 - DNA, 284 bp, Glycine max
  Clone ID: 700554939H1
catcatcaaagtttcttcctttctctgctctttgccttctctgacacatttggtgccttgtagagcgtgttttggcaggaaggtggtatggcgaaggacgttgaggttgctgagcgtggctccttctctgggaaggactaccaggacctccaccagcaccactcattgatgctgaggagctcacaaagtggtccttttacagggctctcattgctgaattcattgccactttgctcttcctctacattactgtgctcacagtcatagggtacaagcaccagact

SEQ ID NO: 1277 - DNA, 285 bp, Glycine max
  unsure (1)..(285): unsure at all n locations; Clone ID: 700554940H1
aaccaccacgagtttctctatctgctttcttcacaaagagtaactngctcttctaaaaactttctccaaaaccattattattctctaatctttcgtttcttcaattaattaattggtttcttgctancgctgtggactctgcgatttcnccccattgggtcccccggcctgtgagaaggacgcaaagncnttgcggttcatcgaagaaatgactcgcaacgccgacgccgtccaggagagagtcctggaggagattctcacacgcaacgcccagacagagtacct

SEQ ID NO: 1278 - DNA, 282 bp, Glycine max
  unsure (1)..(282): unsure at all n locations; Clone ID: 700554941H1
ggccaatcaatccccatcantttgtgggctgtcactggctcctgttgttattggtgtgtccatggcatnnttgaccgagctctcattcaactgggtcggcttcataagtgctatgatttcaaacatttcntcacgtaccgaagcattattcaaagaaagccatgactgatatggacagtaccaatatctatgcctacatttccatcattgctctaattgtgtgtataccacctgccgtaattttggaagggcccacactgttgaagcacggcttcaatgatg

SEQ ID NO: 1279 - DNA, 282 bp, Glycine max
  unsure (1)..(282): unsure at all n locations; Clone ID: 700554942H1
ctttgtctctgttctgtgtgtgcgaganatggcgatggcaatgaccgcttcgnaggcttncatcttcaattgacaagcctctgcnccctctcttcaatgaccggttccctctactanaagtcgtctttgcctgatgaagctgtttacgcaaggagcgacccggagttacatggccgaagcagttgaatgctccacttgaggtcgtggatcctgagattgctgatattattgagcttgagaaagctaggcaatggaaggggctagaattgataccgtcagaga

SEQ ID NO: 1280 - DNA, 269 bp, Glycine max
  unsure (1)..(269): unsure at all n locations; Clone ID: 700554943H1
gttttccatgtgggagaactatgtgatattggtttggaatgttgggtttttggnngctttgctctantcagttttctatgtttctttggatctgaaagctggctctttggctgctttgctttgtgctctttgttgattggtagtagctttgttgcaagccaacttgggttgtctctagcttggaaggttgttcttgtggttcagatagtatgttggacagggcagttcattggtcatggagtatttgagaaacgagctcctgctctttt

SEQ ID NO: 1281 - DNA, 154 bp, Glycine max
  unsure (1)..(154): unsure at all n locations; Clone ID: 700554944H1
gaagtttaaagtgatgtgaagtatgagtgtgatcaatattgttgttctcgaatgaagatcatcatcggggcaagttaganaanccagatcattgtatnnatttttaattaatttcatgtgtatacaaatgcattgtgattggaaanaaaaaaat

SEQ ID NO: 1282 - DNA, 286 bp, Glycine max
  unsure (1)..(286): unsure at all n locations; Clone ID: 700554948H1
gcagaaagcaagctcatcctagagttttaaaaatgggcagcagcctcctccatggctctctcttccccatccttggctggcaaggccgtgaagctgggcccatcagcccccgaagtcgggagggtcagcatgaggaagaccgtcaccaanaggcctcctccggaagcccatggtacggcccagaccgcgtcaagtacttgggcccattctctggcgagcccccgtcctacctcactggcgagttcccaggtgactacggctgggacatgctgggctttcggccgac

SEQ ID NO: 1283 - DNA, 288 bp, Glycine max
  unsure (1)..(288): unsure at all n locations; Clone ID: 700554949H1
caaacatccatcatcattattattttactccgaacgagttgacaccgattccactcantcaancatgngggcgattcaggcgttttgagctcatagaacaaccacctttcttccactcctgctactctnnccccttccttcgtcctccaaactcactctctctcgacctcgacctcttgccacttcccagccacttnnnnnctttcncagatctggtgcacgcgccgtcgttcgcttaccggcgcgtggagaggcatctcgagaatgagttgcgtttgcagagcctct

SEQ ID NO: 1284 - DNA, 284 bp, Glycine max
  unsure (1)..(284): unsure at all n locations; Clone ID: 700554950H1
ctgngtcttgcaattgangttgaagtcttgcccttctctcttcaaactccaaacacaagacatcatcatccatggctgcctccgtctccactgtcggagctgtcaacagagctcttttgaacctgaatgggtctggacctggggtttcgctcccagttcatccttctttgggagcagcttgaagaaggttattggctcaagggtccccaacacaaagatttcctctggaagcttcaagattgttgctgtagaagagaagaaagagattgangagacccagcaga

SEQ ID NO: 1285 - DNA, 286 bp, Glycine max
  unsure (1)..(286): unsure at all n locations; Clone ID: 700554951H1
attctgaggcctgtgctgtgctctgaggggccatagtttgggaccctttgaaccctaatctccanccaaanccattttcccgggaaattgccttggaaaagaaagagcgaagaggaaaatgcagaatcacaggctgaagcagcagcanagcagcaacaacaagctcttatgcagcaagctcttctccaacaanagtnngctctancancctggcctccttgctcctcctcagattgaancatatccaagtggaaatttgcctcctggttttgatccaagtacttgc

SEQ ID NO: 1286 - DNA, 168 bp, Glycine max
  unsure (1)..(168): unsure at all n locations; Clone ID: 700554952H1
aaggtaggcagggtgaagagcaggctgaaatcatgttatacangnctgcaaantnantatccaaggcnntggagttgangcccatgagtttgttgagctgnaggncagttaggaaanacttancttcttcatggagaattgaagtgnagattagtcgtgaattgagaa

SEQ ID NO: 1287 - DNA, 281 bp, Glycine max
  unsure (1)..(281): unsure at all n locations; Clone ID: 700554953H1
ttcgccttcngcngcccctccaacggcttcatcngccgccacttcttcggcctacgagattacccgatgggctcntctccctccggcgactacagcttcttcctctancagtnggccttcgccatcgccgccgcaggaatcaccagggctccatcgccgagagtacacagttcgtggcttaccttatctactcttctttcttaaccggtttcgtttaccccatcgtttcgcattggttctggtcctcggacggttggtccagctcgagttgtagcgacgga

SEQ ID NO: 1288 - DNA, 278 bp, Glycine max
  unsure (1)..(278): unsure at all n locations; Clone ID: 700554954H1
gagtctgacatgtgtgcgagtcaacgggcgagtaaacccgnaaggcgcaaggnagctgattggtgggatccccctgtgggttgcaccgccgaccgaccctgatcttctgtgaagggttcgagtgagagcatacctgtcgggaccgaaagatggtgaactatgcctgagcggggcgaacagaggaaactctggtggaggcccgcagcgatactgacgtgcaaatcgttcgtctgacttgggtataggggcgaaagactaatcgaaccgtctagtagctg

SEQ ID NO: 1289 - DNA, 280 bp, Glycine max
  unsure (1)..(280): unsure at all n locations; Clone ID: 700554955H1
gttgcttggcggggataagattaaagattcaacaatggcctctgcttctgctantcttctcaagtcatctcctgttcttgacaagtgcgagtnggtcaaaggccagacccttcgccaacctctcgtgagatgtaacccttcctcacatcagctctcaccatcaaagctgcttcctatgctgacgagctcgtcaaaaccgccaaaacagtggcctcaccggggcgtggtattttggcgatggatgagtcaaatgcaacctgcgggangcgtttggcatcta

SEQ ID NO: 1290 - DNA, 282 bp, Glycine max
  unsure (1)..(282): unsure at all n locations; Clone ID: 700554956H1
ttcacaaaaaaattatcgagatcccctttttctcctaagaaaagccatggctaagggtcccggtctctactctgacatcggcaagaaagccagggatctgctgttcaaggactaccacagtgaccagaagttcaccatcaccaccnctcacccactggagttgctataacagcatcaggaaccaggaaaagtgaactgtttgtggctgatgtcaacacccagttgaagaacaaaaacatcactactgatatcaaagtgatacagattctaatctcttcacaa

SEQ ID NO: 1291 - DNA, 276 bp, Glycine max
  unsure (1)..(276): unsure at all n locations; Clone ID: 700554959H1
atggattatgatggtatgagaaaaccttccaaaaacttatttcactctcgcttcttcctttttgggttctattgctgggattgggagttcttgaccgctctcctcctttttagttcttccccttaatcttctttcttcacaattttatttccttccttattagacgtattagatcagattgaacaaaagggnnnnnnnnnnnnnnnnnnnnggggaataataganataagaaaagattagtgaggttgaaatgtcgcaacgatcggtgccggcgcc

SEQ ID NO: 1292 - DNA, 268 bp, Glycine max
  unsure (1)..(268): unsure at all n locations; Clone ID: 700554960H1
gtgattgctaccacaaccatgaattgtaggaggttggtttatgtagttgtgtggttcaatctgtatgtggcatgcanattcattcaagtttcaggtctggacgcctctaacttcagcaagtgttggttcccagaatttacaactttggtgactcaaattcagacacaggagctgtttttgcagcattcacaggggtgaagcctcccaatggcataagcttctttggaagcctctcaggaagggcctctgatggtcgtctcatcataga

SEQ ID NO: 1293 - DNA, 279 bp, Glycine max
  unsure (1)..(279): unsure at all n locations; Clone ID: 700554962H1
agaagtgaccccaatatacttagccatatctttacttcccaaaacttgctctacaatgagtttccttcgttcttttgcaaganacaaggatatatcaaaagtaggacgcagaggtatccattgcatgcagaaactatgtgcagaaaaatatctcctgattcactagagaaggcccaaaatcgtgtgatagatgctgcactcacacttgttcgagaaaatacaaggcttaagaaagaactcgtgcatagtttgggaggtgctgtggcaacttcaactctt

SEQ ID NO: 1294 - DNA, 285 bp, Glycine max
  unsure (1)..(285): unsure at all n locations; Clone ID: 700554965H1
aagaaatttctgaccctaaccgcgtgtcgttaaaatcctcaaacgcagagtagacatagaattatcaaaaagcggggaaagggagattgaattcgatcctgggacgttaacgttgtttcaattcaattgtggtcctgtcggtgcccatctcagacgacgatgtcatctttatatagaggggaatccaggnnttncnaacaataaaccaagaggacgtcataatttgacaacgcagaagaagcaagagattaaggaagcctttgagttatttgatactgatggctc

SEQ ID NO: 1295 - DNA, 281 bp, Glycine max
  unsure (1)..(281): unsure at all n locations; Clone ID: 700554966H1
ccgtgtttgtgttttcaaagtccgctaaacgcaatccctctcttttcatctanctttctanttctcgttcccttcaaatcttgcactgtattttcancccctcttgccgttcatctctgttatttgagtcaaaggattatcgccngtcagttgcacnagttgacagtattccctcattaagcagtgatctcttctatgatatatttcgtcgacttgatggtgcaacattggctagtgcngcatgtncttgtgcagcattgtgttccatctcaaaagaagag

SEQ ID NO: 1296 - DNA, 272 bp, Glycine max
  Clone ID: 700554967H1
gctctgagatcattaaagattccattttggaggcccctgcgatgaattttttcccaaatgtgcgttctggtagctatgccgagattggaccgcgcgtttctatggatgatgaacacatttgtattgatgatctggagctcatcttggatttgtgttcaagtgccccgataccgagtgcattttatgcagtttttgatggccatggggggcctgatgcagcagcctttgttaagaggaatgctatgaggttgttttttgaagatgcagacatg

SEQ ID NO: 1297 - DNA, 281 bp, Glycine max
  unsure (1)..(281): unsure at all n locations; Clone ID: 700554968H1
gataaaagtaaggtcaagaataaatatttacacaaactatcaaataataatgtatgtggtgttnagttgactggtaagtaagggaaggtagaaattgaggagattgaattgcaatagcaatgagtgtgtcttcaaattcgaaggatcgatggaattatgcatatttgatttgcggagaggccaacacgaaggccaagagctcgataagattctcttcttcttccccgccggtttgcccttttcaaagcaantctccgtcattggcctcagcgaaggactca

SEQ ID NO: 1298 - DNA, 281 bp, Glycine max
  unsure (1)..(281): unsure at all n locations; Clone ID: 700554969H1
acaaaagaaagttcgaaaaaagaggaggaaaaaaaaaaggaaaatgaggaaagaaaangtatagaaatagcagaagcctgggatagcattatatttgctcaagtaataagaggtattttattaataacccaatccattcttagaaatatattctattaccttcattgataataactaaaaatattgctcgtatactattttttcaatttcccgaatggtcggaagattttagggattggaagagagaaatgtatattaaatgcacatataatggtgttcaa

SEQ ID NO: 1299 - DNA, 279 bp, Glycine max
  unsure (1)..(279): unsure at all n locations; Clone ID: 700554970H1
aaaaaataaagtacacccagcatttgtcagggaaaggagagcaatgaagagggattatgaagaatttaaggtgaggattaacagtttggtggcaacagcacaaaaggttcctgaggatggatggaccatgcaagatgggactcctggcctggaaataatgtgaggnnatcatcctggcatgattcaggtcttccttggtcaggatggtgtgnttgatgttgaaggaaatgagctaccccgcttggtctatgtttctagagaaaagaggccagggtttga

SEQ ID NO: 1300 - DNA, 277 bp, Glycine max
  unsure (1)..(277): unsure at all n locations; Clone ID: 700554972H1
ttccattgacaaatgaagctatcgtgattcctactcaggttaantacattggaaaagcagccaacatttatgatactggttatcggcttaatgggagtgcatatgttatttccaaatacattagcaatacatggttgtnggacgtgtacttgttagtggtggagcttatggaggtttctgtgattttgatactcactcgggagtgttctccttcttatcttatcgtgatcccaatttgctgaagacacttgatgtatatgatggaactggtgacttc

SEQ ID NO: 1301 - DNA, 279 bp, Glycine max
  unsure (1)..(279): unsure at all n locations; Clone ID: 700554973H1
ctttgccttcccatatctcctgcagtttatccgtgagtacacnggcaaagttgatgaactggtgaaggataaaattgaagcgcagaaccaagtgaaggctaaagaacaagaagagaaggaagtaattgctcaacagaatatgttgctcagttgttgcctcttgctttncccgcaccaccaatgcctggaatgggaggaggctttgcgcctccccctccaatgggtggattggggatgcctccaatgcctccttttggaatgccacccatgggcagctac

SEQ ID NO: 1302 - DNA, 277 bp, Glycine max
  Clone ID: 700554975H1
agaattggctcctccagaaggcacgctgtctctgaatctttttcagccaacaagcaggttccagtaaatctggagaacattaaaataaagaagtttgtactaatccatggagaaggttttggagcatggtgttggtacaagctgttgcccttctagaagaagcagggctgcttcctgttgccttagatcttacaggctctggaattgatctcacagacaccaacaacgtcactacattggcagattattcaaaacctttaactgtttatctgcaaaa

SEQ ID NO: 1303 - DNA, 275 bp, Glycine max
  unsure (1)..(275): unsure at all n locations; Clone ID: 700554976H1
gctggttcaactgaggtgatggctttgaatttgccttctcccgcccaagtgaagcccttatttttctcttcaaataactccacaaaacttccaggtngcttttctttgaagagaaaagatagtgacacaacagtagagagcgagtttattgctctgccgctgctcaatcaccaccaccagcatggccaggaacagctattcccgagccttctgatttcaagacatgggatgggcaaaaacctatttctgtcttaggatctacgggttcaattgga

SEQ ID NO: 1304 - DNA, 277 bp, Glycine max
  unsure (1)..(277): unsure at all n locations; Clone ID: 700554977H1
tccagtaagggcaaaaagcgcaaacatgttgtaaaacagggttcatcaagatctgcaacaacttcaagacgttctgcaaagagtcagaagaaaaatgaagattcttcagtagtacggagaaagagtacaagtnacacagaaatgagtcagaggaagacgagaaagatgaagaaaatgaggaggaaaatgaaaatggtgttcctgacaaatctgaggatgaaacaccagagaaatctgaaagtgaagacaaaagtgattctggaagtgaatctgaaga

SEQ ID NO: 1305 - DNA, 120 bp, Glycine max
  unsure (1)..(120): unsure at all n locations; Clone ID: 700554978H1
cagcttgttcttgaatggagctattcattggttggttcaaccctatgatagactttgtgttataattgcatttgatgtgatggaaaaagtgtntttttaaaggcactantctcttccaca

SEQ ID NO: 1306 - DNA, 273 bp, Glycine max
  unsure (1)..(273): unsure at all n locations; Clone ID: 700554980H1
gacaatagttgtgttgtgttcagttaagggtgaaccttagcaacagcatgctacatcactattctgtgtggaacctgttaaatgtgctatagctttatttcaacttctccatggcttcttttctttccttatctctcccaagttaaacttaataaaggcctcttcagcagctaanaccactacaacaacaanaaccactcttcccacagctgagacactnaatgagaaatttggcaganaaggcatcaagttcttggagtctgataacactcc

SEQ ID NO: 1307 - DNA, 279 bp, Glycine max
  Clone ID: 700554982H1
aacacattcctctagcacaatgtgaatggtttagcgacttccaaccatttatcagtcccaatcagaagaaaggctgtagcaatggcaataataactcttcattagcacaatgtgcttttcaatacattgctgtcaagtttaaggattgttcctttccatcactggccgaattctctttgtttcactggttaatggattggaacctgatactattgatgaagctctcagatatggaagggaggttatggagtgggaaaaatgggatccctctattgtaac

SEQ ID NO: 1308 - DNA, 277 bp, Glycine max
  unsure (1)..(277): unsure at all n locations; Clone ID: 700554983H1
cataatcggatcaaagagttnctggggtcagcaaaatagtataaggnnaaaaaatggatttttggaaagtgggtttgcttagtcttctttgtgccgcttctgcttttgcaattggggctgtggagctgggtcgacatcaacnactgagagaatttcaggtagtgctggtgatgtgttagaagatgatccagtgggaaggttgaaggtttttgtttatgaacttccaagcaaatataataagaaaattctgcaaaaggaccctagatgcctcaatcat

SEQ ID NO: 1309 - DNA, 278 bp, Glycine max
  unsure (1)..(278): unsure at all n locations; Clone ID: 700554984H1
tgggtggagatgatagttggtcgccatgtgtccacgaacagtatttgattcctcctgtgccatactcantctctgttaggctgtgcccagtaaatccagccacttctggtcatgacatctacaaatcccagtttcaaaantctgatttcttggatcacatgacttgttctattcaagaataaacatcttgtagaagaccgaagaccgaagaccaaagactggtgtgcttactaaggactacaaagaaacttggaagctattggtgtaaagatcccatg

SEQ ID NO: 1310 - DNA, 278 bp, Glycine max
  unsure (1)..(278): unsure at all n locations; Clone ID: 700554985H1
tccctttctctctctcaaactaaaaactaaaacccattttcttctccaaaaccttcgacttcgcttttctctaaccgaaacgcgcttcgcagcacttcttctccactctctcacatctctgacccattgcgctatatttacgactgtgtcaaattcccccataaaaccggtattgattctccctcagatcaaaatagagttctgagaggtagcagtgttactggcaatgaaaaatcttctgtagcttctattccgcactcaaaattgcattgtganat

SEQ ID NO: 1311 - DNA, 269 bp, Glycine max
  unsure (1)..(269): unsure at all n locations; Clone ID: 700554986H1
gacaatagttgtgttgtgttcagttaagggtgaancttagcaanagcatgctanatnantattctgtgtggaacctgttaaatgtgctatagctttatttcaacttctccatggcttcttttctttccttatccttcccaagttaaacttaataaaggcctcttcagcagctaanaccantanaanaanaacaaccantcttcccacagctgaganactnaatgagaaatttggcagaaaaggcatcaagttcttggagtctgataaca

SEQ ID NO: 1312 - DNA, 278 bp, Glycine max
  unsure (1)..(278): unsure at all n locations; Clone ID: 700554988H1
gtccctttctctctctcaaactaaaaactaaaacccattttcttctccaaaaccttcgactttcttttctctaaccgaaacgcgcttcgcagcacttcttctccactctctcanatctctgacccattgcgctatatttacgactgtgtcaaattcccccataaaaccggtattgattctccctcagatcaaaatagagttctgagaggtagcagtgttactggcaatgaaaaatcttctgtagcttctattccgcactcaaaattgcnctgtganat

SEQ ID NO: 1313 - DNA, 209 bp, Glycine max
  unsure (1)..(209): unsure at all n locations; Clone ID: 700554989H1
agaagttctttggacgcctcaaagcataattttgttaattggatggaaatgctggatttctattcggttaccatatcttataaacatattgtagtgttttctgttttgacattatggatccccgagtagtgagtttttccccccttaagttggccaaacttttgttgagactgatcttttaaaaaattccaaattgtttgatttnatat

SEQ ID NO: 1314 - DNA, 272 bp, Glycine max
  Clone ID: 700554990H1
ctgacaaacaaggccggaagagggcttgtgtgacttactgcataacctacattttgagttgcatcaccaagcattctcctcattacaaagtcctgatgttgggccgtattttgggaggtattgccacttcacttctgtttcagcatttgaatcgtggcttgttgctgagcacttcaagaggggctttgatcaacaatggctatcattaacattctcaaaggctatatttcttggaaatggtcttgttgctattttgtctgggctgtttggaa

SEQ ID NO: 1315 - DNA, 275 bp, Glycine max
  unsure (1)..(275): unsure at all n locations; Clone ID: 700554991H1
cctaagcccaaggcacctgtagctggtgccccacaaggccttaccgtttaatttttaggttattagggctacggcaaagaacagttttgtgcagaaaattganagagcggagagaaatataccgatgatttcgttcgttctgtgccaagaaagtaatacaccatgaattgctccagcattttcaacatcagtcaatctacatgcnagcngacgatgtgaatcctccctccatcagatttgagaaaataatgggtactcgttgaagttgtttatct

SEQ ID NO: 1316 - DNA, 272 bp, Glycine max
  unsure (1)..(272): unsure at all n locations; Clone ID: 700554992H1
taaganacacttnggatctctggaatctttgcacaatactgnccacagctggaccggtgaattagaaaaacntaaccacgacatggggttnttggctacggctgnaaganatcccattttctntgctnaccattcaaagtcgataggatgtggaacatatggaaganagaattgctggatggangangatttgatcanaaaagtgacgaatggttggaatccagtttcttcttctacgacgagaacagtaactatgtgcgtgtgaaggtcaa

SEQ ID NO: 1317 - DNA, 275 bp, Glycine max
  Clone ID: 700554993H1
atcataggctctctctctagggtttgatcagactcaagggtttaagccatgggaaaaaggaaggcaaaggcaaagcctcctccaaagaagcgaatggataagctcgataccgtcttcagctgccctttctgcaatcatggagcagcgtcgaatgccgccttgacatgaagaacttgataggggaagctatttgcgggatatgccaagagagctttagcactaccatcacagctttatcagagccaatagacatatacagtgagtggattgatgaa

SEQ ID NO: 1318 - DNA, 275 bp, Glycine max
  unsure (1)..(275): unsure at all n locations; Clone ID: 700554994H1
tttttcttcacttcttgttcttggtggaacaaccttgtaagttcnnnaacaatgacttcctcggttacttcctcttttcgcatcaacaatttgaattctgtttttnttggtgagacaaataaattcagagtttcaactgtcctggtgctcatgttggtttcattaganagactgtagaatgtaaggnatcacgaattgggaagcnannaattcctgtcccatccaatgtcacagtcaaattggaaggacaggatatacaagtgaaaggtcctttg

SEQ ID NO: 1319 - DNA, 278 bp, Glycine max
  unsure (1)..(278): unsure at all n locations; Clone ID: 700554995H1
tcttgcagtcgcagaggnanancctagctagtagtctcagttcgtttgagagagaaaaaatggcagagggtctcgttctccgcggnaccatgcgcgcccacancgacgtcgtgacggcgattgccactcccatcgacaactcgacatgatcgtnacggcgtcgcgcganaaatccatcattctctggnacctcaccaaggaggncaagacctacggtgtcccccgccgccgcctcaccgganattctcacttcgtccaggacgtcgtcctctcatccg

SEQ ID NO: 1320 - DNA, 272 bp, Glycine max
  unsure (1)..(272): unsure at all n locations; Clone ID: 700554996H1
ggctttggctttggcctgaacttcagaattttgtccctatctcctagtttcaggaangctatctatagaccacattgtccctgcatatgaaaggagcagttgcagggcaatctttttggattatgatggtacggtgtgcctcaggcttccattgttaaaccgcccagtcctgaagtcatatccgtgctaaataatatatgcagtgatgttagaaacactgtgtttattgttagtggcaggggaaaaacctcactgagtgaatggtttgatca

SEQ ID NO: 1321 - DNA, 302 bp, Glycine max
  unsure (1)..(302): unsure at all n locations; Clone ID: 700555001H1
ctccactcagaagcgaagaanaagccacagagaactagtctcctacttctcacccgcaaganaaaaatggcatctcacatcgttggatacccccgtatgggtcccaagagagagctcaagttcgctctcgagtctttctgggatggcaagancagcgccgaggatttgcagaaggtgtcttctgatctcagggcatccatctggaagcagatggctgatgctgggatcaagtacatccccagcaacactttctctcactatgaccaggttctcgacgccaccgccaccctcggtgccgttcc

SEQ ID NO: 1322 - DNA, 297 bp, Glycine max
  unsure (1)..(297): unsure at all n locations; Clone ID: 700555002H1
tcaaggaacatgatttagaaaactgccaagcccacccatattcattctctcaaaacttccaaccatgaactgaagcaccacacatacccacttcctncaaagacatcatttttattaccaatcttccaatttcagagaaaattctttgtgggcatctcttaattaaaaaaatgtcaagcttccccaacacggtggcggaaggccgcaggtccagcaaggcaccggaaaaatccactttttctcagacttgcagcctcttgagccagttcttgaaggagaaacgtgcttctgctgatt

SEQ ID NO: 1323 - DNA, 117 bp, Glycine max
  unsure (1)..(117): unsure at all n locations; Clone ID: 700555003H1
antganananagagagactcggtcactgcctctgtctccaatcatccgcattcattgtgccatgttactctccgatccctcttatactctttgcctccaactcttccacanaanata

SEQ ID NO: 1324 - DNA, 294 bp, Glycine max
  unsure (1)..(294): unsure at all n locations; Clone ID: 700555004H1
ggttgtttctcattgggctgattccccanacaagattgatncaggcaatagaatcttgtcntgtgcaattgcattgngtaagtntgtgtatatataccattcgggatcaagangggantcattataactatntgtgaantgtnacataatcaanaccntatttgttgtgattgatatcgtgcaatatncncgtnattaccataatatatagagtcatatgatgtggtaaattgttgcacaccttcaggttantctatcttaaagntacatttcttaaaattctaatctagcatg

SEQ ID NO: 1325 - DNA, 295 bp, Glycine max
  unsure (1)..(295): unsure at all n locations; Clone ID: 700555005H1
gaaaaaagctgaccccttggaaaatggtttccaggcttcactaggatttggagactcacttctgaaatggctnatgctttgactccccaagtttcaattttgagagaatatcaatgcttttgagaatttaaccaaagttctctcattcactgcatgacttggtgctaatggcaaataggcaccacccctcagtgtttctggtgttggttactgttntactttctatccattgctctgagcaattgcaatcctctcactctcagactcttctcagaattcagcagctattgaactt

SEQ ID NO: 1326 - DNA, 293 bp, Glycine max
  unsure (1)..(293): unsure at all n locations; Clone ID: 700555006H1
tgagtctctgtctcatgtttgtttgtcaggggtttatgtctggtctggtattgtgacgcatgttgttgcagttgcacaacacaaacaaagatacatagattcattcatattagtattagannnnnnnnnnnnnnnnnnngaatttcactcaagttatcannngttttcgttcatagaaactagaaagatgtgtgaaagtagtagtagcagagtcacatgggaaggttgcagcgtcttgctcgacatcaacgacggtgaccgtctcgttttcgctcgtctctcccccgctgcaa

SEQ ID NO: 1327 - DNA, 257 bp, Glycine max
  Clone ID: 700555007H1
gttcttctcgaacgaacctccaatctgcttgtcacaaaagaggaagggttggaactctatgaagacatgatattagggaggttttttgaggacaagtgcgctgagatgtattataggggcaaaatgtttggttttgttcacttgtacaatggccaagaggctgtgtcaactgggttcatcaagcttctgaagaaggaagattctgtagtgagcacctacagagatcatgttcatgcattgagtaagggggtcccatc

SEQ ID NO: 1328 - DNA, 295 bp, Glycine max
  unsure (1)..(295): unsure at all n locations; Clone ID: 700555008H1
acttcacaattcacaatcaatcacatttcaaaggcatgttttttcaacaaagttcattctacccacgagtcgattncaacaaacccagacgctaattctcccttctctatccccgcacnnnnnnnnnnnnnnnnnnncatttatccctcagtggaaacaacagagaatctcatttgggaagagccaaacacgactacagaagaagccatggaaaacgttctggtcacggtcccgggtgcgattctgcatctgatagaaaaggattccagcgtgcaccttgcttcgggcgacctca

SEQ ID NO: 1329 - DNA, 289 bp, Glycine max
  Clone ID: 700555009H1
ggaagcttacctccctcaacttgcgctgattattttcttggctttgttgcccaagttgcttctgttcttgtctaaatttgaaggcattccaaaagtcatgcagttagggctgcatcaggaaaatatttttattttaccgtactgaatgttttcattggagttactattggtggaaccttgttcaaagcattcaagagaattcgggagcacccgacgttggatgaaatttcgtccttgctagctgaaagcctcccaggcaatgctacttttttcttgacctacgtggccc

SEQ ID NO: 1330 - DNA, 287 bp, Glycine max
  Clone ID: 700555010H1
ctcctcaatccacataccagtgccagagggagattaaagaatctgctgccgccatcaaaattcaaactgcatttcggggttacctggcaaagaaggctttgagggcattgaagggaatagtgaagcttcaagctatcattcgtggccgagcagtaagacgccaagctatgagtactcttaagtgcttacagtccattgtgagtatccagtcacaggtctgtgcaaggaggctccaaatggttgaagggagatgtgattactctgaaaatgaagacatgcaagattct

SEQ ID NO: 1331 - DNA, 276 bp, Glycine max
  Clone ID: 700555011H1
aaagtttcttcctttctctgctctttgtcttctctgacacatttggggccttgttgagtgtgtttttgcaagagggtatggcgaaggacgttgaggttgctgagcgtggctccttctctgggaaggactaccaggaccctccaccagcaccactcattgatgctgaggagctcacaaagtggtccttttacagggctcttattgctgagttcattgccactttgctcttcctctacattactgtgctcacagttatagggtacaagcaccagacgg

SEQ ID NO: 1332 - DNA, 285 bp, Glycine max
  Clone ID: 700555012H1
ctgagcttgaacagctctggagctggagcttcagttcccagttcagccttctttggcaccagcttgaagaaggttattgcctcaagggtccctaacgtcaagatttcttctggaagtttcaaaatcgttgccgcggaaaaagagattgatgagaaacaacagacagacaaggacagatggaaaggtcttgcctatgatgtttcagacgaccagcaagacatcacaagagggaagggtttggttgattccctcttccaagctccacaggatactggaactcactat

SEQ ID NO: 1333 - DNA, 287 bp, Glycine max
  unsure (1)..(287): unsure at all n locations; Clone ID: 700555013H1
agtntgtatagtgtaggatttgttggtattcgtgataaaaacacctcatcctattcattttgccatgacgggcgaactccagataaaggttttgaaagtaatgagaaattattaattcatccatgttactggcttggtttgaatctaaatcgtaatgcacttgctccagaggaagcagaggagataaatgacgaatatgatattaatattatttcagataattcagccattagaaataaaacaataggtcaaataactactcatctagatcagataccgataggaaa

SEQ ID NO: 1334 - DNA, 283 bp, Glycine max
  Clone ID: 700555014H1
gcctttttggttctgtgttctgtgattttgggcctgagtttactgttgttgatgtggatggtgaagaaccccatactggcattattgcatccataagcaatgacaaccctgctctagtatcctgtgttgatgatgagaggcttgagtttcaggatggagatcttgttgtattctctgaagttcatggtatgaaagaattgaatgatggaaagccaagaaagattaaagatgctagagcatactcttttactcttgaagaagacaccacaaattatggtacgta

SEQ ID NO: 1335 - DNA, 284 bp, Glycine max
  Clone ID: 700555015H1
gcggccgttacgtggagtgagtaactatattgagcgtcaaatcggagaatcgaaatcggaggaatcaaagccctgctgaatggcgccaccggcaccacccaagtcaagtcagggtcaggtgatgaataatgcaaggattcacttcttttccattctcctcgctctccaatacggtgctcaacctttgatctccaaacgcttcatcagacgtgaagttattgtgacttcatctgttttgacttgtgagcttgcaaaggttatatgtgcagtgttttttatggcaa

SEQ ID NO: 1336 - DNA, 285 bp, Glycine max
  unsure (1)..(285): unsure at all n locations; Clone ID: 700555016H1
tcctatactctatttttcgcgtcacataaacaaaaaaaataaactggggagaagcatgttgttgatgttgggactatgcttcctattgttctctgcatttccacttgcgttctctganagatgccacccacaagacaagaaagcgttgctccaactccagaaggacctcggcaacccttatcacatcatatcctggaacgcaaaggaggattgctgcgagtggttctgctgcgttaagtgtgacgagaaaacaaaccgcgtcattagcgttgccttatcatcccc

SEQ ID NO: 1337 - DNA, 293 bp, Glycine max
  Clone ID: 700555017H1
cggaagagggttgcgcgctggatttgttcctgtttctccaaccaaagtttactggttcatctgcttcaatagtccatctgcaggtccaaaaataactgattcattggagctgaagaagcaagctaaggaactggtgaagaattggccttcagagctattgaacatagtggattctacgccggatgacactgtcattaagactccattagtagataggtggctttggccagccataagtccttctgcttctgcaggaagagttgtggtggttggagatgcatggcatccaatga

SEQ ID NO: 1338 - DNA, 100 bp, Glycine max
  unsure (1)..(100): unsure at all n locations; Clone ID: 700555018H1
caaacacacagcacgacgaaacctagcagcctcacgccctcatcgcagcagggacctagccgtngccggagacgcactgagtctganancngcggtnact

SEQ ID NO: 1339 - DNA, 290 bp, Glycine max
  unsure (1)..(290): unsure at all n locations; Clone ID: 700555019H1
cgaganagcaaaaagcccaagcagtcgtcttggtgctgccgattggtcaaaatatataaatccatttgttgaaatttgttactgtattgcattgcgtttgctgcacccatcaatggcaggcgtttctctcaagtgcggtgactgcngtgctctgctgagaaccgtagaagaagcgcaagagcacgctgaactcacctcccactccaacttctccgaatccaccgaaccggttctcaacctcatctgcaccgttgctccaaaccctgccgatccaaaaccgagagtgattt

SEQ ID NO: 1340 - DNA, 290 bp, Glycine max
  Clone ID: 700555020H1
agaatagttcatgcatttatttcttgcattactactgggaatgttaaggtccagtggaatgtttgtcatgctctaggcaacttattcctcaacgagacattaaggctgcaagatatggattggactccagttgtgtttggtgttcttctgcaactattacgtaattcatcaaattttaaaatcaggatacaagctgcagcagcattggctgtgccaatgtcaatgcaagattatggcctatccttttcagagattgtgcaatctgtagagcatgtaatggagaatattga

SEQ ID NO: 1341 - DNA, 291 bp, Glycine max
  Clone ID: 700555021H1
atcactctccaaccacaatggctgtcttgggcggcgccgcctccgctcgcatcattccctccgtctcactctccacctcttctcgctccttcttctccttatcatcctcttccaaactcaaatgcttgcgctcctctcctcgcatttcgcacctctttctcaatcagcaaagagcggaggttcgcgtttcgagtggaggatacggaacggtatcggcgccgaagtccgttgcgtctgatcctgatcagttgaagagcgctagagaagacatcaaggagcttctcaactcca

SEQ ID NO: 1342 - DNA, 290 bp, Glycine max
  Clone ID: 700555022H1
aaggtgatgaccatctctgacaacttcgttgtcaccgacgtcaacggcaacatcgtattcaaagttaagggatcgctcgcgaccctccgtgaccgccgcgtcctcctcgacgccgccggcaaccccctcgtcacccttcgccggaagataatgacggcacatgatcgatggcaagcttttaggggtgaaagcacagatgccaaagatctaatctttactctgaagcggtcgtcccttatccagtttaagaccaaattacatgtgtttttggccaataacaccaaagaaga

SEQ ID NO: 1343 - DNA, 268 bp, Glycine max
  unsure (1)..(268): unsure at all n locations; Clone ID: 700555024H1
gtaatccacctcgcatgtcctncacatcatcggtcataccgaagatcactgagaagcagataactggagccggcgataaaaggaacagttaatgtgttgaaggcggcgaaggaagcgggggtggagcgcgtggtggcgacttcgtcgatctcatccattatgccaagccctaactggccagctgataagattaaggcagaagagtgttggacagaccttgaatactgcaaacagaaggggttgtactatcccattgcaaagactctag

SEQ ID NO: 1344 - DNA, 285 bp, Glycine max
  unsure (1)..(285): unsure at all n locations; Clone ID: 700555025H1
ctcactcactggaagccttgttgtgagtaagggaaaggcttcctgcactgagcaccaagttgaaacctcttgattctttgcttagaattccacagaatatggagaannntctnntcaatgactccccacctttggagttcaagggtatgagcaaggaggaggaagactcattgctagggcaagttgaaatatggaggtacatgacatgcttcacggactccgtggccttgaaatccgtcatagagctgcgcatagccgacataatagaccgttatgggaaaccac

SEQ ID NO: 1345 - DNA, 222 bp, Glycine max
  Clone ID: 700555026H1
gcttgcaaattagaagaatcttcagttaaaagggaagaagaacacacaagaagaaagagaagaagaaacgcgcgcgaatgaagggagaattagagttgccacctgggttcagatttcaccccactgatgaagaattggtgaatcactacttgtgtaggaagtgcgctggtcaaccaatcgcggttcccgtcatcaaagaggtcgatttgtacaagtttgatc

SEQ ID NO: 1346 - DNA, 252 bp, Glycine max
  unsure (1)..(252): unsure at all n locations; Clone ID: 700555027H1
ctctgagctcagatcctctgcagnnaagcccttctgctcccgctacacccccaatttattctccttctcacttagggttttcatctccatttccgaacctggttaaccggttcaaattttctgttttcgtgctgaattttgaagttgcagctcgatcttcgatctggggtttcgggtgaagtgacacggtaggtagccggtgacgttgcttggtgttgttggatctgttcccagaaaaaaaagaagggacat

SEQ ID NO: 1347 - DNA, 251 bp, Glycine max
  unsure (1)..(251): unsure at all n locations; Clone ID: 700555028H1
atcataactcttcctttccttttatcgtttnntccagaaaccatggatgccatgacactgtcactccngctccctccggttccggtctgtacagtgcccgcgtctgcatcaacctcgtcctctgtttctctcactcactcctggtcggccacggccaggcagaggctctcctctcacagaacaagacccattttccggaattattcctctgcggttccaaaacttacagtggtgacatgcggtgcggctgt

SEQ ID NO: 1348 - DNA, 281 bp, Glycine max
  Clone ID: 700555029H1
atgcattccagccctttgcttcttgaggaacccattaggatggcatccatccttgagccatccaagcctactttttttccggctatgacgaaaattgttggcacacttggtccaaagtcacgatcagttgatataatttcccattgccttgatgcaggaatgtctgtggcaaggtttgacttttcatggggtgatccagaataccatcaagagacattggaaaatttgagagttgctatcaaaagtaccaagaaactctgtgcggttatgctagatactgt

SEQ ID NO: 1349 - DNA, 283 bp, Glycine max
  Clone ID: 700555030H1
caatgggagaggaaaagaagccatgcttctttcaccatgtttgcaatgcttgttggattgctctctcagagccttgtccattcctgtaatatccaccactgttgacagatcagaagaactactacaccccagatccacatgctggaagtccccccacaggtttctccgattctctgtgctcacacaatagtagtcctccatctcatggccatgggagctctccaccctcacatcacaatagtccaagtactccatcaacaccctcaggtggaaactgtggatc

SEQ ID NO: 1350 - DNA, 283 bp, Glycine max
  Clone ID: 700555031H1
aaacaaacgcaggttcccaattgaaacggttctgaagaagtgaagaacaatctaggttttcctttctccgattcactcccagagcgaagaagccgccatgggaggcgaggagaagcggcaccagatgatgcagaacctcttcggagaccaatccgaggaggaggaagagctcgacgttgattctgagcacgaatcaaacccgcaactcaattacccctccgacgagggggagggggtgggggagcaggagggcgaggtggagggccagggcgaggtggagatc

SEQ ID NO: 1351 - DNA, 292 bp, Glycine max
  unsure (1)..(292): unsure at all n locations; Clone ID: 700555033H1
gtctataccgcacttcccttattggcaataataatggcttcccttctctcatctaattctgctgctgcctaggcattatgaagttaatcctagactcaagatntgaggctactttgatagaagaaacatgtagtgcncaaaaaccaaaagggaccanaggangaggnacttcangttggaataataatgagagngaaganaagggtacgtncttgagttggaatgatntaagggtgactgcttctgtgggaaagaatggaacnaatcaattcntgagggtcnaactggttat

SEQ ID NO: 1352 - DNA, 289 bp, Glycine max
  unsure (1)..(289): unsure at all n locations; Clone ID: 700555034H1
gccatttattcccactgtttattgaacatggcacagattttggctccctctacgcaatggcagatgagaatctcaaaatcctctcccaatgcaagtcccattacatcnaacatgtggagttctttattgtggaaacaaaataagaaagtttcacccacaagttctgctaaatttagagtgatggcaattaagtctgacaatagcatcatcaacaggctagagggtctacttaatttggatatcactccattcacggacaagataattgctgagtacatttggattgggg

SEQ ID NO: 1353 - DNA, 289 bp, Glycine max
  unsure (1)..(289): unsure at all n locations; Clone ID: 700555035H1
cgtgaattcacaagcgatgactcattcctaaaccaagttatccctgaaaacatcaccgaattccaagtgactctgtccctcgctagagactacgatggcaacaactcaaccaacgcnaagttcattccttactgggacactgaaaaggtcactcccgaagtgataaaaaaattcaagaaaaaatncgaacccaccgcactgagggttaaggttcttgtcagcattggaaacaaaaacaaacaatttcctttcaccattggctcggactcgaacagcgaacatgggtctc

SEQ ID NO: 1354 - DNA, 285 bp, Glycine max
  unsure (1)..(285): unsure at all n locations; Clone ID: 700555036H1
ttgttctgagataatncagataccctttaaggtacaaaacctctgtttttgtcagagtagatttaaagtttctccctttatttttattcatttttgtgtttggattattggtgtggtagactttgtgatattcttcggttcaaagatttaatggggttatctgagaatttaattgatgggttttgttttgttgattgagttttattgctttaccggcagttattccttgaataaaagaagatccgtgttcatctcactaatcaggtgctgaagattcgttttnnt

SEQ ID NO: 1355 - DNA, 265 bp, Glycine max
  unsure (1)..(265): unsure at all n locations; Clone ID: 700555037H1
cgcaaaccctaacctanttcttcnatatcggcacctctatcccctgaaccctgttccatcttccaaccatgggcgaaccaagacttcgaagagcgcncgcagcaaccgcagganctagggtacgacccgaactttgtccccgactcggtanaatctttngtggtncacctgtaccgtcacatccgtgaaaagaacgtgtacgagatccaccagatgtacgagagctccttccagaccctctcggagcgtctcttcaaggataccc

SEQ ID NO: 1356 - DNA, 287 bp, Glycine max
  unsure (1)..(287): unsure at all n locations; Clone ID: 700555039H1
tngagggtgagatcttgcagtcatccaatctgaagaactttagtttgacagaactcacagctgccacaagaaatttccgtaaagacagtgttttaggaggagaaggtgattttggatcagttttcaagggctggattgataatcaatcactggctgctgccaaacctggcactggcgttgttgttgcagtgaaaagacttagtctggatagcttccaaggtcagaaggattggttggatgaagtaaactatctaggccagctttctcatcctcatctagtgaaatta

SEQ ID NO: 1357 - DNA, 286 bp, Glycine max
  unsure (1)..(286): unsure at all n locations; Clone ID: 700555040H1
ttttgaggaagaagcatagcgatgatggcatgcagtagtagcacaatgcagagtgtgtacccgagggtnagtggagcgaatttccacgttccgctatcttccccttctctcgttcctatttacaacaacaacctctccttttcaaagctacgcaattcaattcatctcgcggcggtgccattnccgccgttaaccaaagcctctgcggggaacggcggccccaccgacgagggagtgtctttagggacgatgaagcttcctttggacactgacctccagagattcg

SEQ ID NO: 1358 - DNA, 283 bp, Glycine max
  Clone ID: 700555041H1
ttagaggacgagacacaaatcaaaccagctgaacaaggtggaggtcctggaaacctggctgaggttgatgaatcaatggaagaagatgatgttggcaagaacaaggggaacagtgaagctggcatgcaaaatgaaaaattatatgctgcagatggtatgcttaatacaaaaatgaggcgagcagagaagaagaaaaggaaaaaggccaagaaagccggagcctcatcggatcccgtggatggtgattatgacttcaaagttgattacttccaaaagggagcct

SEQ ID NO: 1359 - DNA, 280 bp, Glycine max
  unsure (1)..(280): unsure at all n locations; Clone ID: 700555042H1
gtatattcactccaagtggggccttctcaatgttgcagctaaattgcctcattactccttgcagaatgatgtaggacccaagatatatatatcttatgggattagtgatgaacttggtagaggtgattcagtgacaaatctccacttcaatatgcgtgacatggtgtaccttttggttcatacaaatgaagtaaagctgaaggactggcagagaactanaattgaaatgatgcanaaagctaaagctaataaggaatttgaggcaaaagaatcacatggg

SEQ ID NO: 1360 - DNA, 279 bp, Glycine max
  Clone ID: 700555044H1
aaacaaacaactagcaagggaagaaagaaactacagaaaagaaatggcttccacttctgcagtttcaatggctatgccagtaacttatgctagccagaagagggtggtgcctagctcggatgcattcttcaagccactgcctctacggtcttccaaggcagtgacagcatcaaaactcaatggaaggtttcaagtgagggcctccatgaaggagaaagttgtgacggggctcaccgcagctgcattgacagcttcaatgatggttcctgatgtggctga

SEQ ID NO: 1361 - DNA, 271 bp, Glycine max
  unsure (1)..(271): unsure at all n locations; Clone ID: 700555045H1
ctttctccctcctctttttctcatccaccaacaccanttcanttgtctnctnnnnnnnnnnnnnnnnnnnntcatttgcttctctgcatctcacacttatcatanccnnnacaacnctttnganatatgtttatggttatggattcagcaganaggtgcttagattctcaactatggcatgcctgtgccggtgccatggttcagatgccacccctcaacacaaaagtcttcgnctttccccagggcnacgctgaacacgctcatgggaagg

SEQ ID NO: 1362 - DNA, 141 bp, Glycine max
  Clone ID: 700555046H1
aagtttaaagtgatgtgaagtatgagtgtgatcaatattgttgttctcgaatgaagatcatcatcggggcaagttagacaacccagatcattgtatttatttttaattaatttcatgtgtatacaaatgcattgtgattgg

SEQ ID NO: 1363 - DNA, 279 bp, Glycine max
  unsure (1)..(279): unsure at all n locations; Clone ID: 700555047H1
gaaaaacaaccctggcactacgattctatctctgcgatgatcgggttcattattgttggcgatgatgactcataaatcacaatcatgatgagtagttgaaatcgaaaagagaaaaaaagttcnnnnnnnnnnnnnnnnnnnnnnncgctataccagcagcagcattttcttttccatttccaacatcaacagcgagagaaaggatcatcgatcatcatgtcgttttcgtttttcaaggctttgaggcctaaaacgccgcaagaggtggccaagtccatc

SEQ ID NO: 1364 - DNA, 279 bp, Glycine max
  Clone ID: 700555048H1
aagaagatggcacaaacgctggcaatgcccgtggcaccttcgctagctatcatctccaattctcgcctctccaacacactctccgttcccgttctgaacaaaccaaaggttcaagggtcaagcatcaagtgcgttcgtgttggcggtgtggagattccgaacaacaagcgaatcgagtactcgctgcagtacattcatggagttggaaggaccagagcgaaacagattctctgtgatatccaaatggataataaaatcacgaaggaactcactgaggag

SEQ ID NO: 1365 - DNA, 285 bp, Glycine max
  Clone ID: 700555050H1
tgcggcgtgtggtctttctctccgtgacacagcacaaacaaattctcagtgttggagacttgagctcatagagaaatcatagtttgtttaatttcaattctgagcaaaggtcaacatgcaagttttttccattgaaggcgaaagtgctttgtcagttgttggtccaaggccaatggaatggtctactgttccatacaatgcccctcaagctcctgggccaaatggaaagcagcggacctcaagtttggaatcaccgatcatgttgctgtcaggtcaccagagtgc

SEQ ID NO: 1366 - DNA, 286 bp, Glycine max
  Clone ID: 700555052H1
ataaccaacccttcgctgttgctaaagagttggtgcgagagatcgaaatttcccattggggcaatatacagatcacagagcattacagtattatccatgctggtgctcagagcaaaggagaattttctaggcttgactatcagaccaggcaatttttaagaggtgcatcagcctttaggcgtcttgttgccaagctaccaccaagagctcattctgtgtactacagggatgaaattggcaacatttccacttctagtttatggggtgactcaaaaaaagacagaac

SEQ ID NO: 1367 - DNA, 285 bp, Glycine max
  Clone ID: 700555053H1
aaaacaactttcaaactctgagaaagaatggctgccaacacattgatgagtactgctatctcagccttcccatctctcctttcttcctcaaaatccagatttgccaccgcagttcctctttctagctttggtgtcaccaatgcctcttcttctcgcttttctattagtgctgactggatgccaggccagcctagacctccttaccttgatggttcagcacctggtgactttggattcgaccctcttcgtcttggtgaagtaccagagaatcttgagaggttcaaa

SEQ ID NO: 1368 - DNA, 284 bp, Glycine max
  Clone ID: 700555054H1
atcaacaaaccaaaaaggtaaactttttgcaacaaccatggttgcaatggcagcagcaacagcatccacccagttgattttctcaaagccttgttccccttcacgtctatgccccttccaactatgtgtctttgacactaaacaagtgctatcaagtggcaggagaaggcatgtggggggttctggagttaggtgcatggctgtgggggaagcagcaaccactgggacaaagaagagaagtggatatgagcttcaaacactcactagctggttgctgaagcagg

SEQ ID NO: 1369 - DNA, 282 bp, Glycine max
  unsure (1)..(282): unsure at all n locations; Clone ID: 700555055H1
taggatactctaaagtattttaatatcgtcaganatttctcatttcttacaaattgtcataagatgattctaggttgcagacttgcggttgttttgtagaatgattgnttgtattgctaattattaatttaataaagatctgaaaatttcatcacctttcacttttccaggcttctttatttgctagattaatttactggcatatgttattttaatgtggatagagagatatggagtttagttaggaaacaccagtggtaaagttgtgagaaacaggaagaa

SEQ ID NO: 1370 - DNA, 284 bp, Glycine max
  Clone ID: 700555056H1
tacctgggctgctttttggttgattttacttggcgtagttatgattgctggtggggcattccttgtgtacaagtacagaataaggcaatacatggattcagaaatcagagcaatcatggcgcaatatatgcccttggacagccaagcagaagttccaaatcatgtcaatgatcaaagagcatgaaggcaaaaatgggccaatcccttggaatttcacggcaggcagcatgggtgtgacttttcctgtgccattttgaactctggtcattgaacttaatagactg

SEQ ID NO: 1371 - DNA, 278 bp, Glycine max
  unsure (1)..(278): unsure at all n locations; Clone ID: 700555057H1
gtcaggaatccctgctttaggtggtggattgccaagagttattgcaacatggggtcttactatagttctcacttacttgaactataggggtatgaccattntgggatgggttgctgtttgtttaggggttttctcactcctcccttttgtggttatggggtttttgtcaattccagacctaaagccttcaagatggactgtgacaaatctgaatgatgttaactggaatttgtatctgaatactctattttggaatctcaactattgggactccataa

SEQ ID NO: 1372 - DNA, 278 bp, Glycine max
  unsure (1)..(278): unsure at all n locations; Clone ID: 700555058H1
ggccaggcaagccccactcaaccaccacacctctcctcgttcacgctacccctttctgctcttcttctacctttcaagttttaaaagtataaagatggcagagacattcctatttacctcagagtcggtgaacgagggacaccctgacaagctctgcgaccaaatctccgatgctgtcctcgacgcttgcctcgagcaggacccagacagcaaagttgcctgcgaaacatgcaccanaaccaacttggtcatggtcttcggagaaatcacgaccaagg

SEQ ID NO: 1373 - DNA, 276 bp, Glycine max
  Clone ID: 700555059H1
ggagctctctgtgcccttcagattccgatcacggaacctcctctcaccctctacacacatacccatcacctacccttccaagcatcaaccaccctttttaactaagtttgtcaacaaacccaagatttctaaactaacggtgagagcgcagagaagggcacccattgaagggctgagcgatgagttgaacgctatagctcgttgtaaccttgactttgcttacactcgaagaagggtccgcgctgctttcgctgatatgcagcagcagctggatca

SEQ ID NO: 1374 - DNA, 276 bp, Glycine max
  Clone ID: 700555060H1
aatcactgagaagaagagcaaggataatgactgatggattcaacagttgcagaaatgtggtttgtaattttactgaaggtgccatgtattcattccctcaaatacgcttgccgccaagagctttagaggctgctaaacaggctggaaaggttccagatgtttactactgcctcaagcttttggaagccactggcatatccactgttcctggttcaggatttggtcagaaagaaggggtgttccatttgaggacaactattttaccagctgaggaag

SEQ ID NO: 1375 - DNA, 275 bp, Glycine max
  Clone ID: 700555061H1
tcgtggcagcattcaacggggccggggacgtggaagaggaggtcgtgatgaaaaggtatctgctgaagatcttgatgctgatttggagaagtatcatgctgaggctatgcaattaaactgaaggaaacaacgatgttctgttttattgctattacatttgcggttgttagggccatgttgatggaacaccgccgaattatgtatctttatcacagtcgtgcttttcggaaaggaaaaggataacttagagtgaaaacttttacagttgatatatg

SEQ ID NO: 1376 - DNA, 275 bp, Glycine max
  Clone ID: 700555062H1
gaacacccacatctatccggaattcgttgttagcttcaaagtctcatctgatgctgaaggtcatttttgtggaagtgagggtaagaatgtttctggggttaattcagcctgtcagggtcctcatggcttgttacattcagaatcttctacagtagataatggaaaagctcctagtatggttgctagcaccccaaaagttccaaaatccccttggatgccttttcctttgcttcttgatgctatcagaaatcaggttcctcccaagggtatggatg

SEQ ID NO: 1377 - DNA, 276 bp, Glycine max
  unsure (1)..(276): unsure at all n locations; Clone ID: 700555063H1
tttcgtttcgttcattcggcgtagaagcaaaagagagagataganngagggaaaaaggttgctaccaacaacaaacaaaaacagtgttgcttgattccgcggtggcgagaaccgacgtgagcggcggaggagaggcgcggaacggtggtcttcagggttttctgacgtctctgttctcgaccctcggcggtgttttcgggtcaacgtttcaagaaccgcatcaaagtgttatcatggcttccagattggaacaacagcaacaacccaccaatgttg

SEQ ID NO: 1378 - DNA, 248 bp, Glycine max
  unsure (1)..(248): unsure at all n locations; Clone ID: 700555064H1
aaattcaaccgttctcgccattgccgaagctccaacnngtcgcatttccaactcttcacccaaaaccctttttgttggaacagagtttcagagagagacccttcacaacatggcaaaaacgaggccaggcagaaaagacttggattcctacaccatcagaggcaccaacaagatcgtaagagctggggactgtgtgctgatgcgcccctctgatacgagcaagccaccgtacgtggcgcgcgtggaga

SEQ ID NO: 1379 - DNA, 284 bp, Glycine max
  unsure (1)..(284): unsure at all n locations; Clone ID: 700555065H1
cttctccaattcccctttctctgaatctagancgttgagcttcaanttcagctcatttatgtacgatatggcgtcacctaacaacgatgccttgtccatcttggatacatttggaactacagctcgtagagatagaatctttgattcagcttttctctcctttgtctctcggcttccacgtgattcagcggcnccctctctgccgttggccggctttcgccccctcttccgaggccgtttctccggctccatcactctgctgtctgcctgtttcaccatggaag

SEQ ID NO: 1380 - DNA, 284 bp, Glycine max
  Clone ID: 700555068H1
cactcataacacaaagcacaaagcaaagctcatccttgagttaaaaaatggcagcagcttcttccatggctctctcatccccatccttggctggcaaggccgtgaagctgggcccatcagccccagaagtgggaagggtgagcatgaggaagaccgtcaccaagcaggtctcctcaggaagcccatggtacggcccagaccgagtcaagtacttgggcccattctctggcgagcccccgtcctacctaaccggtgagttcccaggcgactacggctgggacact

SEQ ID NO: 1381 - DNA, 282 bp, Glycine max
  Clone ID: 700555070H1
ctgctcttgacaagtacgacttcgattctgaagttggcggcaagattaaaggcactgtgttctacacagataacaatggagcagttgttgatatcactgcaaagtcttcggcatatttgccactgcaagaggcgtgcatccacagggttaagcatgttgaagaagcaggcttagttcctgggttcaaagaggagtttttgatcattggtgagaactcaatagatgatagcttggtcttgagtttaaggtctcttcagtttgaccttgcatgggaacgttgta

SEQ ID NO: 1382 - DNA, 281 bp, Glycine max
  unsure (1)..(281): unsure at all n locations; Clone ID: 700555071H1
ttcttcaatcaagcgaaggtngtctcacttgactcgattgcaagngatccacgacacactgttcgcttcacaaagcttcgaatccaattcctcagtaacatctgcangaagtcttctccttcaccatgccaccnaagcctttagactatgggtcaataaatgaaaacgtgaagaagagtcaatatgctgtcagaggtgaattataccttcgagcttctgagcttcagaaagagggcaaaaagattatatttactaatgttggcaacccacatgcattggga

SEQ ID NO: 1383 - DNA, 282 bp, Glycine max
  unsure (1)..(282): unsure at all n locations; Clone ID: 700555072H1
tttctttgtagttctcaaatttattcataaaactttgtgtttccacaactaccagggaagtanatcattcgggaataaatcatgaatggggctagtagcagtaaaananaaagaaaaaggggaggtcggcccaaaagtaattactggaatgaagttgaaaaaataggtgacatgtggaagtgcaaccattgtgaaggggagttccatggaggtgctacaagaattaaagagcatatcattggtggaggaaaaaatattagaaaatgcccccactatcctgct

SEQ ID NO: 1384 - DNA, 279 bp, Glycine max
  unsure (1)..(279): unsure at all n locations; Clone ID: 700555073H1
acttcatgtgattcaagactctgttaccatggttggtgaagccgccgttccaattataacccttataatgggagcaaacctccttaaaggcttgaagganagcaaatacttctatttggacagttataggaattatagtagttcgatatattttcctgccaattttgggtattctagttattaaaggagcaacacaattgggtttggtgcaaccagatcccttgtatcagtttgtgcttctccttcaatatgcacttccacctgcaatggctataggca

SEQ ID NO: 1385 - DNA, 275 bp, Glycine max
  Clone ID: 700555074H1
aatcactgagaagaagagcaaggataatgactgatggattcaacagttgcagaaatgtggtttgtaattttactgaaggtgccatgtattcattccctcaaatacgcttgccgccaagagctttagaggctgctaaacaggctggaaaggttccagatgtttactactgcctcaagcttttggaagccactggcatatccactgttcctggttcaggatttggtcagaaagaaggggtgttccatttgaggacaactattttaccagctgaggaa

SEQ ID NO: 1386 - DNA, 253 bp, Glycine max
  Clone ID: 700555075H1
cccttagccaacacaaccatcatggccacctctgctattcagcaatcagcattcactggtcaaactgctctgaagcagctcaatgagttcgtccgcaagaccggtggcgccggcaaaggtcgcactaacatgcgccgcaccgtcaagagtgctcctcagagcatttggtatggccctgaccgtcccaagtacttgggtccattctcggagcagattccatcatacctgaccggagaattccctggtgactacg

SEQ ID NO: 1387 - DNA, 273 bp, Glycine max
  Clone ID: 700555076H1
aatggttcaaacatgctaacggtgtatgctcctagagctattctgaagtgtcatttacaccaagattcagcttctgctcaacaagcatatccatgcaagatcaataataatgctaatttggtgaattgtaatcctaaaccttttggcactccttgtagtaatatattgtttcatagttcctcctctgggaaatgtgataagctacaaaagagccttcatctattccatcatgtcgccacacataaatggctgtgtgggttacaggattccatt

SEQ ID NO: 1388 - DNA, 276 bp, Glycine max
  Clone ID: 700555077H1
cgtgaattcacaagcgatgactcattcctaaaccaagttatccctgaaaacatcaccgaattccaagtgactctgtccctcgctagagactacgatggcaacaactcaaccaacggaaagttcattccttactgggacactgaaaaggtcactcccgaagtgataaaaaaattcaagaaaaaatacgaacccaccgcactgagggttaaggttcttgtcagcattggaaacaaaaacaaacaatttcctttcaccattggctcggactcgaacagc

SEQ ID NO: 1389 - DNA, 273 bp, Glycine max
  Clone ID: 700555078H1
gacctgagaagaaaaatgctgttgtctcagatgagaagaagaaattagtagcctatcatgaggctggccatgctctagtgggtgctttaatgccagaatatgaccctgtagccaagatatcaattattcctcgtggccaagctggtggtctcacattttttgctcccagcgaagagaggctcgagtctggattgtacagtagaagttaccttgaaaatcagatggctgttgccctgggtggaagggttgccgaagaggttatttttggccagg

SEQ ID NO: 1390 - DNA, 275 bp, Glycine max
  unsure (1)..(275): unsure at all n locations; Clone ID: 700555079H1
tacaatgnaaaaagttacaaaagggatcgcattttctttgctaataagacatatcttccaaatgaaactccaacnnccactagtgaagtacagaaaagaagaattggaaaatctaagaggagatggaaaaggagagcgcaaggnatatgataggatctatgattatgatgtctataatgatttgggtaacccagacaagagcaatgatctagctcgtcctgttcttggagggtctagtgcctatccatatcctcgcaggggaagaactggtagaa

SEQ ID NO: 1391 - DNA, 272 bp, Glycine max
  unsure (1)..(272): unsure at all n locations; Clone ID: 700555080H1
atgacttggaccaacatgtagatgttacagattctcggctgaggagagtgcagaagaacttggcngngttaaacaaacgtaccaagggtggttgctcctgcttgtgcatgcttttatcagtgattggtatagtgggtttggtggttgtcatatggctgttggtcaaatatttgtaaagataaaaaatacccaactcgtgaagtttctctttttttcatgtttctgaatgtgcattgaaacatgataacgtgtttctttgttttttcttggtg

SEQ ID NO: 1392 - DNA, 282 bp, Glycine max
  unsure (1)..(282): unsure at all n locations; Clone ID: 700555081H1
ctcatcacttactggaagccttgttgtgagtaagagaaaaggcttcctgcaccgagcacaccaacttgatacctctgattctttctttgcttagaattccacagaatatggagaagngtcttntcaatcactccccacctttggaattcaagggtttgagcaaggaggaggaagactcattgctagggcaagtggaaatatggaggtacatgacatgcttcacggactccgtggccttgaaagctgtcatagagcttcgtatagcggacatactagaccgtt

SEQ ID NO: 1393 - DNA, 282 bp, Glycine max
  unsure (1)..(282): unsure at all n locations; Clone ID: 700555082H1
gcaagctggttaccagcttgaccaggggaactgttcgctcacctttagcgcagtgccttttgatccgttacacaagtcaggttattcatgaatcaggccatacacagtgcaggggaacgccccttctatgattatcttgagagtngccttcgccacaagtcagacatngtgatttttgaagctgccagggcaataacagagctcaatggtgtaacaagccgagaattaactccagcgattactgttcttcagctattcttaagttcgactaagccagtcttg

SEQ ID NO: 1394 - DNA, 280 bp, Glycine max
  unsure (1)..(280): unsure at all n locations; Clone ID: 700555083H1
cagcattgctgtggggatttatattttgcttcgtgctgttgaccggtttgctgctaattacaacagctttccaggacagtttgacagtgcaatggatgaagatatacctcgattaaagagcacagcaattggcctacttaatgacttgggatgcaatggagccactttggctgaggaccttatcaatgagatgtgtcgatttggtgcggcagagcttcatgctgttgctgctttggtnggaggaattgcatcgcaagaagtgatcaagctcataacaagg

SEQ ID NO: 1395 - DNA, 281 bp, Glycine max
  Clone ID: 700555084H1
gcatggcaatgccatgcgtacgatatgttccctctccgaatgaacactggctatggtgcccgtactccggaggtgaaatgcgcaagttggaggcttgctgtggaagcacacaacatctttggctttgagaccattcctgaagagtgcgttgaagcaacaaaggaatacatccatggcgaacaatatagatcagactccaaaacagttaaccaacaagcttacttttatgccagagacctcgaagtccatcccaaggacacatttgtgttcagtatagatgg

SEQ ID NO: 1396 - DNA, 279 bp, Glycine max
  Clone ID: 700555085H1
caccctctggtcgattttcaccgccaattctcaaacgccctaaaccactctccattcgatcagtttcaattcctgctgcaccagcatcagggtctctggcccctgcaatttctgttacggataatgtgctgaagcacttgaataagatgaggtctgaacgaaatcaagatttatgtttaagaataggtgtcaaacagggtgggtgctctggtatgtcatacacaatggattttgaagacagggttaataaaaggccagatgattcaatcattgagtatg

SEQ ID NO: 1397 - DNA, 281 bp, Glycine max
  unsure (1)..(281): unsure at all n locations; Clone ID: 700555087H1
gttttgtcatctaaganaacctagtgagagtaagcacacattgatcagcaacaatggcagcctactcaagccatgctttgaaaaccatccctttttcttcctttgtgaagcctgtcagtaccaaaccaacatcattcttcacaccttcacctaccaaacctttcttacccttcacctcaccaaaccactctctcaccaaaaatctcaagctgaactccactttgcnacacttttgcttgtcttcagttcccaaganatctttcacttgtagaagccaggct

SEQ ID NO: 1398 - DNA, 280 bp, Glycine max
  unsure (1)..(280): unsure at all n locations; Clone ID: 700555088H1
agaaaaagcgataaangtgcggtctctcaccgcacgcactagcactgtctctcactgaaacttgttcgcacattttcacggatctaactaagttatcgccatgaatcgccaccacgatcccaatcccttcgaagaagaagaagtcaatcctttttcgaatggcactactgctcctgcatcaaagtcacgtattccaccattagcatctgantnactgggctttggtcaaaggcatgangctacagttgatattcctttggatactacaaatgactccaag

SEQ ID NO: 1399 - DNA, 274 bp, Glycine max
  Clone ID: 700555089H1
gtacaatgcagttatgcagggttggcaacttgtattcaactgggagcaaggattgaactttcaggttcgagatgtatgtgctcgcgtcttgacagacatggcttgggttaccatgaaaacatatgttgacatggatacagggccattcaatgtgaccaatatttatgagttccataatggacggtggtatatggttcatcatcacagttctgtggatggggatgtggaccatcagattgtgcatggataatagtgagagatgatgatacattgt

SEQ ID NO: 1400 - DNA, 273 bp, Glycine max
  unsure (1)..(273): unsure at all n locations; Clone ID: 700555091H1
aaaagcagttatgaaacttaaatttgaagaagcaattgctgcaccagagtctgaaaggcgttcaatagctgaatccatagatttccgtacgatagatgttgngccacaatattcaggagcaagaatagagggggatgttgttactttgaattttgtgaaaaaaatgattgaagatttcaagaaccagacgttcttacataaacggtatgcattccagattgtattgcaaaccaagagaggcattgcaagctttgccttctcttgttgacatac

SEQ ID NO: 1401 - DNA, 270 bp, Glycine max
  Clone ID: 700555092H1
ttcagaacaatagttgaaaataaaaaaaattatggaattattcttccgggatacaaaagattatgttttgaattgcattgttactttcaatggcgacaggcaaaggaaggaggtggaggaggatgttttgtggtggtgcgactggtgaggaggaggtcgtgtgactgctgtgaagaaggtgaagtcatgggagaagaagttgccatggcgggagtggtttgtacaaagagaaaggtgttagggtcggagaaggatagtttggtattttca

SEQ ID NO: 1402 - DNA, 272 bp, Glycine max
  Clone ID: 700555093H1
ggaaagaagctgaaaatactgtgcctccacggattcagaacaagtgggagttttcttaaaaagcaaatcagcaaatgggatccttctctattcattcaatttgatatggttttcccagatggtaaataccctgctggagggaagtctgacatagaaggcatcttccctccaccttactatgagtggtttcaattcgaaaaggacttcacagtgtactttaacttggaagaatgcatctcatacttatgcgattatattacagccaatggtcc

SEQ ID NO: 1403 - DNA, 273 bp, Glycine max
  Clone ID: 700555095H1
ccggcgctgaccgcaaggaggccgccgagagcacgctctccgcctacaaagccgctcaggacattgctaataccgagttgcctccaactcaccctatcaggctgggtcttgctctgaacttctccgtgttttactatgagattcttaactctcctgatcgggcttgcagccttgcaaaacaggcttttgatgaggctattgctgaattggatacattgggagaggagtcatacaaggatagcactttgatcatgcaactgctacgtgataacc

SEQ ID NO: 1404 - DNA, 275 bp, Glycine max
  unsure (1)..(275): unsure at all n locations; Clone ID: 700555096H1
ccggcgctgaccgcaaggaggccgccgagagcacgctctccgcctacaaagccgctcaggacatcngctaataccgagttgcctccaactcaccctatcaggctgggtcttgctctgaacttctccgtgttttactatgagattcttaactctcctgatcgggcttgcagccttgcaaaacaggcttttgatgaggctattgctgaattggatacattgggagaggagtcatacaaggatagcactttgatcatgcaactgctacgtgataacct

SEQ ID NO: 1405 - DNA, 189 bp, Glycine max
  Clone ID: 700555101H1
cagaagttctttggacgcctcaaagcataattttgttaattggatggaaatgctggatttctattcggttaccatatcttataaacatattgtagtgttttctgttttgacattatggatccccgagtagtgagttttttcccccctaagttggccaaactttgttgagactgatctttaaaaaatttc

SEQ ID NO: 1406 - DNA, 290 bp, Glycine max
  unsure (1)..(290): unsure at all n locations; Clone ID: 700555102H1
ttcggggttaagcactgtcacagtaccgatggctataacagcnggagctgctggtgtgggtgtaggctctgcagttaatagacttaatgatgtggttgctatgattgctgaggtcagaagcattgctaattcattgcagacaccatttcagatatccactgcacatgaagtggaaactcaaagacagtaggttatgttgcaaagaaaccagatgaagggaggtgtaaggtagtgaattaaacatgccaaggaatattaaggaactgttccaattattggggtnccngggg

SEQ ID NO: 1407 - DNA, 95 bp, Glycine max
  unsure (1)..(95): unsure at all n locations; Clone ID: 700555103H1
cngccacttgaggtgaaagangtgtatgccaatacacccctgcacttatgangggtntggaagcaggntgggagtgaacaaaggggccattttgg

SEQ ID NO: 1408 - DNA, 187 bp, Glycine max
  unsure (1)..(187): unsure at all n locations; Clone ID: 700555104H1
gtgtggttgaaagttaagaagtagcaaagatgtttccattcnggcacaagggtcaaaagataaaggggactatggtggttatgcagaagaatgtgttggatatcaacagcatcaccagtgttgacgggatcgtcggcaccggcttagacttcttaggcatgcatcgatacagttacttttttagccc

SEQ ID NO: 1409 - DNA, 100 bp, Glycine max
  unsure (1)..(100): unsure at all n locations; Clone ID: 700555105H1
cggagactgagacgtttgcttttcaggccgagatcaaccagctcctcagtctaatncatcaacaccttctacagcaacaangagcanaccatcttacgtg

SEQ ID NO: 1410 - DNA, 280 bp, Glycine max
  unsure (1)..(280): unsure at all n locations; Clone ID: 700555106H1
ctttttttattttattttatttttgaggacacttggagctgcgagcactagttttcccttttccccttgtttgtntntttaggataataattgaccaattgggtatcttgtcagttgagacatttttcaagaagtagcaaagctccttctacaatatttgacttggtgctttccttttggatcttacaatgggaaacagtgaggaagagaaatctaccaagactgaaaaaccttcttcacctgtaacagtggatcaagccaatcagaccaaccagaccat

SEQ ID NO: 1411 - DNA, 260 bp, Glycine max
  Clone ID: 700555107H1
ataagggtgaatagggacctcagagtggcgttcgatgaagtttccacaacgtgtgtgcaatccacagaatggagagtgggtgagaacgacacgaggagtggaaggaggcttattatcactggccgagacgaaaccacgggatcatacggtaactattttagaattgtggaaacagaaaatgttggtatctataacattcagtggtgccctaccgaatgtgccccacttgtagattctttgtggcactggtggtattctga

SEQ ID NO: 1412 - DNA, 294 bp, Glycine max
  unsure (1)..(294): unsure at all n locations; Clone ID: 700555109H1
gggagctggaaacagcgaaagtgaaataccactacttttaacgttattttacttattccgtgaatcggaagcngggcactgcccctcctttttggacccaaggtcggcttcggccggtcgatccgggcggaagacattgtcaggtggggagtttggctggggcggcacatctgttaaaagataacgcaggtgtcctaagatgagctcaacgagaacagaaatctcgtgtggaacaaaagggtaaagctcgtttgattctgatttccagtacgaatacgaaccgtgaaagcgtgg

SEQ ID NO: 1413 - DNA, 290 bp, Glycine max
  unsure (1)..(290): unsure at all n locations; Clone ID: 700555110H1
tcgtctattgcnccgccggcatatcagggggacacataaacccggcggtgacgttcgggttgtttttggcgaggaaggtgtcgctgacaagagctgttgggtacatggtggctcaggtgtngggggccataagtggggtggggcttgtgaaggctttgcagaagagctactacaacaggtacaaaggtggcgtgaacatgctcgctgatggttacagcaaaggaaccggtttgggcgctgagattattggcacctttattcttgtctacaccgtcttctctgctaccgat

SEQ ID NO: 1414 - DNA, 280 bp, Glycine max
  unsure (1)..(280): unsure at all n locations; Clone ID: 700555111H1
aagtgattgcattttggcaattttgctagcacatncgatcatcaacgtggtttcanaaaaaacttgttcctttacagtagtttatctttgcagagtcttaggtgtttgttttaccagttatattttgaagtgtccgccgatttcatgtagccgtagccttcaaaactgggttcttgatcggcggtaacattttcgttgctgtttgtttttgatgagtactgttttttgttttgatggtaaaagtctgagatttcaaatcacaagcagccatagggtttta

SEQ ID NO: 1415 - DNA, 99 bp, Glycine max
  Clone ID: 700555112H1
gccaaaatttgttaaaagagtccaaaattattggtatgtaggtattgaattcttttgttcatttattcttttatgatgaatattgtaatatatttatga

SEQ ID NO: 1416 - DNA, 210 bp, Glycine max
  Clone ID: 700555113H1
agaagttctttggacgcctcaaagcataattttgttaattggatggaaatgctggatttctattcggttaccatatcttataaacatattgtagtgttttctgttttgacattatggatccccgagtagtgagttttttccccccttaagttggccaaacttttgttgagactgatcttttaaaaaattccaaattgtttgattttatat

SEQ ID NO: 1417 - DNA, 289 bp, Glycine max
  Clone ID: 700555114H1
ttctgggctaaatagaggccttgctgcaagcgaagacgatcttcgaaaggcagatgatgctgctaaggaacttgaagctgctggaggacttgtggatctctcgcttggtcttgacaatttgcaaggaagatggaaactcatttatagcagcgcattttcgtctcgaacccttggtggaagccgtcctggtcctcccataggaagactccttcctattactcttggacaggtttttcaacgaatgacatcttgagcaaagatttgataacatagtggagcttcaataggt

SEQ ID NO: 1418 - DNA, 291 bp, Glycine max
  Clone ID: 700555115H1
tcagcagagagaagagaagggctacacaaacacaatctctaatggcactcaggatgtgggcttcttccactgccaatgcactcaaactctcttctgtctccagacctcatctcttgcctcctttttctttctccagatgcttatcttccgtcttggatggacttaagtacgctgattcacatgaatgggtcaagcacgaaggctcagtcgccaccattggtatcactgaccatgcccaggaccatcttggagaggttgtgtatgtggagctgccagaaccaggtggcacag

SEQ ID NO: 1419 - DNA, 291 bp, Glycine max
  Clone ID: 700555116H1
gttgaagtcttgcccttctctcttcaactccaaacacaagacatcatcatccatggctgcctccgtctccactgtcggagctgtcaacagagctcttttgaacctgaatgggtctggacctggggtttcagctcccagttcatcctcctttgggagcagcttgaagaaggttattggctcaagggtccccaacacaaagatttcctctggaagcttcaagattgttgctgtagaagagaagaagagattgaagagacccagcagaccgacaaggacagatggaaggtctgc

SEQ ID NO: 1420 - DNA, 289 bp, Glycine max
  unsure (1)..(289): unsure at all n locations; Clone ID: 700555117H1
gcaagaagatatatcagacaacttcctcaatatcctcgccaacctttagctcaagtcttcccccatgttcatcccgcagccattgatcttgttgataaaatgctgacagttgatcccaccaaaagaattacagttgaagaagcactagcccatccataccttgaaaaactgcatgatgtagctgatgaaccaatctgcatggaggcattcctcattggatttggagcaacaagaattgggnggaggagcaattaaaggngnggnccaccagggaggattaggcanggat

SEQ ID NO: 1421 - DNA, 283 bp, Glycine max
  unsure (1)..(283): unsure at all n locations; Clone ID: 700555119H1
ccactctccaccaacacaaaagcacttgcaaactagttttgttttgggaacatcatcacattacattagattggtggtaatggcagcgtcactacaagcagcagctactttcatgcaacccaccaagttgagcaggagcaacactttgcagcaaaagtctactcagtccatttccaagggctttggtttggaaccctgttggagctaaaaaggtcacatgctccttcaggctgatcntaaggattggctcacaagtgtgttgatgctaccaaattgcaggatc

SEQ ID NO: 1422 - DNA, 285 bp, Glycine max
  Clone ID: 700555120H1
ttgcagtggagctggtttccaatccatcaataatattcatggatgaacctacatctggtttggatgctcgagcagctgcagttgttatgcgtgcagtgaagaatgttgttgccactggcaggacgacggtttgcactatacaccaaccaagcatcgacatatttgagacttttgatgagttgattctaatgaaatctggaggacggattatttatagtggaatgctaggccatcattcaagtagactgattgaatattttcagaatatacctggggtgccaaaga

SEQ ID NO: 1423 - DNA, 95 bp, Glycine max
  Clone ID: 700555121H1
caaagaacgaaatgacttttgagagtttttagatttgtgtttggtgaagtacttcagataatgtgaattatcttgtgtatccgaatccaacttaa

SEQ ID NO: 1424 - DNA, 290 bp, Glycine max
  Clone ID: 700555123H1
atctgtttcccgccatatatccaataagctttaaccatgtctgcctttgttggaaagtacgcagatgagcttatcaagaatgccaagtacatagccacacctgggaagggcatcttggcagcagatgagagcactggcaccattgggaagcgcctatcgagcataacgttgagaacattgaggccaaccgccaagctcttcgcgagcttctctcaccgctccagatgccctccaatacctctctggtgtcatcctctttgaggaaactctttaccagaaaacctccgatg

SEQ ID NO: 1425 - DNA, 292 bp, Glycine max
  Clone ID: 700555124H1
gggcagactagtatccgatcctctgtcctctcgaagctttcatcgttcaacatattctcaccatctcagtcatgggcctgctatcttgttttaggtctaccgtcctgagaaaatgttccaaaggaagctctggcatgtcaagattcctgtatacgaacaattttcaacgaaacttgatttcgtctggtggcaatgaatcgtattatgggtattttaacaggagatcatacacttcactttatatgggaactggaactgtgggtgggattacaagtgctagaatcagggtgcc

SEQ ID NO: 1426 - DNA, 282 bp, Glycine max
  Clone ID: 700555125H1
ttcccaaccactactactcactcactgcagatctcaattgcatcgctgtccatggctaccatcgttagcatcaaggcccgccagatcttcgacagtcgtggcaatccaactgtcgaggtggatttgacttgctccgatggtacttttgccagagctgctgttccaagtggtgcatccactgggatttatgaggcccttgaattgagagatggaggatctgactaccttggaaaggtgtatcaaaggctgttgacaatgtgaacaccgtcattggccctgctt

SEQ ID NO: 1427 - DNA, 224 bp, Glycine max
  unsure (1)..(224): unsure at all n locations; Clone ID: 700555126H1
gagtgtgaagggtgagtgttcctcaatgccgtcgaacgggaaggcaaatatgtgggaggnnnnnnnnnnnnnnnnnnnggggatggacgagttgctggcggcgttggggtacaaggttcgtgcttccgacatggccgacgtggcacagaagctggagcagttggagatggtcatgtgttgtgcccaggaagagggatttcccacctcgcctccgacaccgtcca

SEQ ID NO: 1428 - DNA, 288 bp, Glycine max
  Clone ID: 700555127H1
ggcaaatgcagttgctcagcaagctttaattgctcactggcaaagtattgtgaaaagcttaaacaattatctaaagataatgaaagccaactatgcaccccctttcttggtccgaaaagtgttcactcaaatattctcattcatcaatgttcaattattcaatagtcttctgttgcgtcgggagtgttgttcgtttagcaatggagagtatgtaaaaacaggtctggctgaattagagcatggtgcatcgaggcaacggaggagtatactggctctgcttgggaggaa

SEQ ID NO: 1429 - DNA, 285 bp, Glycine max
  Clone ID: 700555128H1
cttttctatttctaaaacagcgtttgcttttgtgtttggtcttagacgcagcacgcccccaccactgtttcaaccctcaaattgtgtctcttcgctttctggttttgattaggttttgttccatttgaaacaatattcatcgatccatcgccaaacatgcctctagtcacttgcttcttgaggaacctattaggatggtctccatcctgaaccatccaagcctagttttttctctgcaatgacaaagatgttggtaccctggggcctaaatctagatccgtcgaa

SEQ ID NO: 1430 - DNA, 288 bp, Glycine max
  Clone ID: 700555129H1
gggaatgcaatggagatgaagtattgaaggcagaagctggtgctaaggttcaaaagtttactgaatggggctctgaaatgtatagggcatccattcacgactgcaggatgatagggaaaatgtgatacacagctcagccgttgaaatccagctccggttatctgcctcaagacattccttgatcttgccggcagccgccttacagggaaggacttcagcgaggccttgatgcggctgttttcctcttactcttttctcaagctcattgatccaggttgggcattggct

SEQ ID NO: 1431 - DNA, 291 bp, Glycine max
  Clone ID: 700555130H1
gaagaacggagcgcacgcacatcttctcagctgtgagtgagaatttggagagtagaagaagacgcagctgattgtggaaatgtcagtggcaagattacctggataagcacatgctttcccgaaaactcgaagatgccgtcaatgccgccgttagggccaaaacctccgatcccgttctcttcatctcgaatcacatgcgaaaagcagtgcaatcggtgataacaaaaatcaaggcgaggcagatcctagatagcagaggattccaaccgtcgaagtcgacttgcacataaa

SEQ ID NO: 1432 - DNA, 293 bp, Glycine max
  unsure (1)..(293): unsure at all n locations; Clone ID: 700555132H1
gnacaatgtcaacctcttccataaacgggtggtgcctctcttccatctccccagccaaaacctctctcaggaaggccacattacgcccttccgtcttcgcaacccttaacactccttcttctccttcctcttcatcttccttcccctctctcattcaagacaggcctgtttttgctgcccctgcccccatcatcaccccaactgtgagagaggatatggcaaaggaatacgagaaagctattgagaacttcagaaattgttgagggagaagagtgaatcaaagcgacagtgct

SEQ ID NO: 1433 - DNA, 282 bp, Glycine max
  unsure (1)..(282): unsure at all n locations; Clone ID: 700555135H1
gctcaccttaatggatccatccgagactccacacttcttgaactcactaaggctttgattggaaagggtgccattaatttttccgaagtggagcatatcatcctcaaatataaccgttcagtggaagaagttttcaagctgttcgacctaatccacattctcaccactgatcacaacacgttgcaagaattaccagagaagttattgaggatttggcatcaagaggaaggtggctatcntggagtggaggactactccaaggagaatggatctgtgggatga

SEQ ID NO: 1434 - DNA, 85 bp, Glycine max
  unsure (1)..(85): unsure at all n locations; Clone ID: 700555136H1
tgtgaagttcttaatttcggtgtcggtttnntaatcccagtgttatatattaggnctgcnaatccaacactatactgcacacacc

SEQ ID NO: 1435 - DNA, 190 bp, Glycine max
  unsure (1)..(190): unsure at all n locations; Clone ID: 700555137H1
gggaacaggngaagcgcagagactttgacagantctatgattatgatatctataatgatttgggcaatccagatggtggtgatcctcgcccaatcattggaggctctagcaactatccttaccctcgcagggttagaaccggtagaganaagaccaggaaagatcccaacagtgagaaaccaggcgagat

SEQ ID NO: 1436 - DNA, 188 bp, Glycine max
  unsure (1)..(188): unsure at all n locations; Clone ID: 700555138H1
aggcccttgagcttttctttctttctctgctctcttttcttttaggtttccactctcacacactctccctcttctctttctctgcaataatctctcttctcttcttcactctctcaactcctgccaaacccccatttccgcagttcttaaatttggagtcgatgtntcgncattgctggttaccgaag

SEQ ID NO: 1437 - DNA, 289 bp, Glycine max
  Clone ID: 700555139H1
gttttctgttctctgagaaggtaaaaagcgttaaaacgcagcatctcaaacacgcgattccgaagcttttctgcgatcaatggagttcgacccgatcccaatcggttcgtgctccaaagaacaccagatgatctataaggagtggttcaattacgctgattcagatagcgatggccgcattacggggagtgatgccaccaagtttttcgccatgtccaatttgtcccgcgaagatcttatcaggtgtgggctattgcagattcaaagcgacaaggatatcttggtttca

SEQ ID NO: 1438 - DNA, 292 bp, Glycine max
  unsure (1)..(292): unsure at all n locations; Clone ID: 700555141H1
ccgcaaataatgctggggcaatattagttttaggtagagaccttgttgtggttcctaaactaatccatccattaccaccagcaatttcttcaccagaaacatcaccagaacctcatattgaagatacatggatgcaggagttgaatgctaacagaccgccgacgccaacaagaggccgtcccccagtnacaaacgaccgagcatgatgccatttacgggagtctccgagcctgtgaacttaatccctgcagaaagttttggttctcatcactccatcagcaggccttgataa

SEQ ID NO: 1439 - DNA, 291 bp, Glycine max
  unsure (1)..(291): unsure at all n locations; Clone ID: 700555142H1
ctcttcttccagacagcattagcantcnacaaacaaactctttctggattcagtttttgatgtgaaaatggcagtgactcttacatcaacactctttctggctttgctatttgctgcttcagcttttgctgctcttcagcctagagtacctgaagcttacctccaaaatgggaactttgaggagcagccaaaccctaaatacctgaagaaaacaaagctctttggtaaatacgctttgcctaaatgggagatcaatggtctggttgagtatgtctctgggggtccccaacc

SEQ ID NO: 1440 - DNA, 289 bp, Glycine max
  unsure (1)..(289): unsure at all n locations; Clone ID: 700555143H1
gnaagaatcactcccttatccatttccacaccacatcatngcnacaaccaacgctctctcttcagcctccattctacgctctcccaacntccagtctctganccgaagagcgaaccataatggaagagtaaattaccggaaaccgaataaccgtttctccgtgaaagcctccgccaaagagattgcctttgaccagcattcccgctctgctatgcaggccggcattgacaagctcgccgagctgttgggctcactcttgggcccagagggaggaatgttgtgttggatg

SEQ ID NO: 1441 - DNA, 288 bp, Glycine max
  Clone ID: 700555144H1
ttccaatatattccattctctctgtgtatttccctacctctcccttcaagatgcagatcttcgtcaagaccctcaccggcaagaccatcacccttgaggtggaaagctctgacaccatcgacaacgtcaaggccaagatccaggacaaggaaggaatccccccggaccagcaacgtctcattttcgccggaaagcaacttgaggacggccgtacccttgctgactacaacattcagaaggagagtactcttcacctcgtcctccgtctccgtggtggcatgcagatct

SEQ ID NO: 1442 - DNA, 290 bp, Glycine max
  unsure (1)..(290): unsure at all n locations; Clone ID: 700555145H1
aaagagacaggctcaactaccagacaaattttccattcccggcatctcctccaaacctacgtaccccagataccctaaattcgattcatacacataacacaacacaacctcgttcctttgctgaccaactcggttgttgtttttttctttcactttcacctatggttatggcttctttgattcagttttccccaactcccctctcctctgttcccatcactacccgtttcannggacccanaagtctcgccttcgttgctccttagatgctaatgtttccgacatgagcg

SEQ ID NO: 1443 - DNA, 288 bp, Glycine max
  unsure (1)..(288): unsure at all n locations; Clone ID: 700555146H1
cacgcaaaccctaatcccaaatgctttccttctctgtttctggtttccctccattcccacttcgcagggcatatccaagaagagtaagtgcaagcnttgacattgacaccccacaagancccaattncantcaaccctaatggctcgaatgctaaatttnnnnnnnnnnnnnnnnnntttcganagggaaaggagagagggagagtgataggtggtggtggggttttcatggaagcaagaagaggcggggaagagaaagttcaatgggtttgctgcaattgtgggtac

SEQ ID NO: 1444 - DNA, 291 bp, Glycine max
  Clone ID: 700555147H1
cttaccttttctcttaatccaaatacgatggcagccatggcaaccacaaccctctcttcaaaccccaaactctcattcttcaacggaaagcccgtcacatattcttcccgcgtcgcgcccaccaccaaattatcctcatccaaacaaagaatccatcgtgtcacgggaaatgacgcgccgctacatgaccgacatgataacctacgccgacaccgacgtcgtaatcgtcggagccggttcggccgggctctcctgcgcgtacgagctcagcaagaaccccgccgtgagcgt

SEQ ID NO: 1445 - DNA, 289 bp, Glycine max
  Clone ID: 700555148H1
cttcctcttcctcagtagtgcgattttcgattctcttctctgcaactatgcctaaccctaaggtcttcttcgacatgaccatcggcggtcaacctgccggccgcatcgtgatggagctctacgccgacgtgactccgagcaccgccgagaacttccgcgcgctctgcaccggcgagaagggcgccgggcggagggcaagcccctccactacaaaggctcgtccttccaccgcgtgatcccgaacttcatgtgccaggcggcgattcaccgccggaaacggcaccggagg

SEQ ID NO: 1446 - DNA, 175 bp, Glycine max
  Clone ID: 700555149H1
aaagtttcttcctttctctgctctttgtcttctctgacacatttggggccttgttgagtgtgtttttgcaagagggtatggcgaaggacgttgaggttgctgagcgtggctccttctctgggaaggactaccaggaccctccaccagcaccactcattgatgctgaggagtcaca

SEQ ID NO: 1447 - DNA, 94 bp, Glycine max
  unsure (1)..(94): unsure at all n locations; Clone ID: 700555150H1
ttctatttggtgttgctagaagatttgccaatatcaggtaaaagatagttaaagnatagaggtggaagcagcattttccttgaatgcccattcc

SEQ ID NO: 1448 - DNA, 283 bp, Glycine max
  unsure (1)..(283): unsure at all n locations; Clone ID: 700555151H1
ancacgccgtcttacgtcggattcactgacaccgagcgtctcatcggtgatgcggccaagaatcaagtgcgccatgaaccccatcaacaccgtcttcgatgccaagaggttgattggtcgtagattcagtgattcctctgttcagagtgatatcaaattgtggcctttcaaggtcattccctggtgctgctgacaagccaatgatcgtggttaactacaagggtgaagagaagcatttgccgcagaagaatctcttccatggtgctcatcagatgcgtgagat

SEQ ID NO: 1449 - DNA, 281 bp, Glycine max
  unsure (1)..(281): unsure at all n locations; Clone ID: 700555152H1
ccttatctttttaaatgctatattgaaaaggaaatgtctaaattatcactttcaagatgacgtggagattcattttgaattatagattgaaaatcccttgcatatactgaataacaatcaagcatataaaagggattttctgggctgatgtagcggattctgttcaatcccatgccttgaagtggcataatatanaaccctcttaggcttgcctatggcttgttgtataacagctgatgaacggggtagtactgggcaggttggtcgaagcaatggtcaag

SEQ ID NO: 1450 - DNA, 99 bp, Glycine max
  unsure (1)..(99): unsure at all n locations; Clone ID: 700555153H1
ctgcttcattgcattattgcagataagatgcaaccctactcccttcagattcgggccaagatggcattcactttcatggctaatgtgaccatncagttg

SEQ ID NO: 1451 - DNA, 288 bp, Glycine max
  Clone ID: 700555154H1
ctgagtcttgcaattgaagttgaagtcttgcccttctctcttcaactccaaacacaagacatcatcatccatggctgcctccgtctccactgtcggagctgtcaacagagctcttttgaacctgaatgggtctggacctggggtttcagctcccagttcatccttctttgggagcagcttgaagaaggttattggctcaagggtccccaacacaaagatttcctctggaagcttcaagattgttgctgtagaagagaagaaagagattgaagagacccagcagaccga

SEQ ID NO: 1452 - DNA, 289 bp, Glycine max
  Clone ID: 700555155H1
cgcaaaaatggcacctgcaacactgtctctgtctctcctcctcctgttctcactcagcatcgccgtaaccgttagatcgagcgactacgactacgattgtgtgtacactgcatacgttagaaccggttcggtgttgaagggcggaacggactctaagatcgggctgaagctgtacgacaagtacggctactacatctacattaaaaacctccgaagcatggggcggcttgatgggcaaggctacgactacttcgagcgcggcaacctcgacatcttcagcggaagggga

SEQ ID NO: 1453 - DNA, 288 bp, Glycine max
  Clone ID: 700555156H1
tctagcttggacgagtgaattagattcatcatcaagatgtcgtctctgatagcagaagatgtgaagagcagatcagaggtgtaccacggggacgaaatgtgccaagtgaagtccaaggagcttctcaaggaaatcgccctccccaacggccttcttcccctcaaggacatggaggagtgcggctacgacagacaaaccggcttcgtctggctcaaacaaaagaagagttacacccacaattcgacaagatcggaaagcttgtctcctacgcgcccgaggtaatgctcc

SEQ ID NO: 1454 - DNA, 98 bp, Glycine max
  unsure (1)..(98): unsure at all n locations; Clone ID: 700555157H1
gnnttcatccactgcttttatgtntctctccctttggnggtgcnttctcctttgaggagaagagagagagtagcaaagtttgtngttaagtntcattc

SEQ ID NO: 1455 - DNA, 290 bp, Glycine max
  unsure (1)..(290): unsure at all n locations; Clone ID: 700555158H1
cgacgagtcaaacaaacaaacccaacattacaaccatggcaacggtgacacaaccgtgtccttcgtggacgcgcggttccgttcctctctcgaagcgcgtcctcccacgacgtcgtttcaccacacgcctcaccacgtacccacaagctgctctggttnnnnnnnnnnnnnnnnnnnnnnnttcttcncccagagacagctctagctccattcagcttctgaccttgtccacgtgccaatgacctgcaagccgaggccagagccatggcacgtgccgccaatgccaccgt

SEQ ID NO: 1456 - DNA, 187 bp, Glycine max
  unsure (1)..(187): unsure at all n locations; Clone ID: 700555159H1
gttcttcttcttaactttctctctcttctctgttctccgtgccggtgctgtaactgcacgcgtgtnttctgtnttcgtttgtngtntttntttgctcncatttgcganggtgagaaccctaaatttgagagagagaggtttgatttggccggaggtgattctccggtgagattttgcggcggatcag

SEQ ID NO: 1457 - DNA, 96 bp, Glycine max
  unsure (1)..(96): unsure at all n locations; Clone ID: 700555161H1
caaacacacagcacgacgaaacctagcagcctcacgccctcatcgcagcagggncctagccgtnnccgganangcactgagtctgaaancagcggt

SEQ ID NO: 1458 - DNA, 241 bp, Glycine max
  Clone ID: 700555162H1
ggatcatggtatggtaaatcctttgggccaaatagaagctaaatcttatttacatcaataaaaaagaactgaattaatacacagtaaatattggaaataaaattggctgaatgaaaccaaaagtaatgtagcactggtattcagttaagaggttcacgcatcatctgcattccggctagggggaggagtaccggcaagccaaccccacacgccacctgaatctctgttatctgtttatctg

SEQ ID NO: 1459 - DNA, 289 bp, Glycine max
  unsure (1)..(289): unsure at all n locations; Clone ID: 700555163H1
atcgaaatttccctatacttgcttccgcaaggnaagaattctacagtactcgccgataaggggttttnccaaagcaggagcaatgtcttcctcttatcttcctgccacaactgagtcncttgctctggcaaatgaggccaaagacccatctgaggccatctccatctttatcgggtacttgatgatccttcttcttcaccagatgctttgcgtatgaaagagcaagcaatcacaaacctnactaagcttctcactgatgaaaataggggagaggatctgtgcagcctct

SEQ ID NO: 1460 - DNA, 295 bp, Glycine max
  unsure (1)..(295): unsure at all n locations; Clone ID: 700555164H1
gggcaatgggcaacccaagcctctctcttaaccccacccctctccggtctcaaagccagcgaccgcgcctccgtgccatgggaagcaaaaactccagcctctccttntccagcccgaagcccctcaagttctccagaacaatcagagcagcagccgccgacgagaccacagaggcaccagcaaaagtagaggctgcaccggttcgggttcaacccaagcctctctcttaaccccacccctctccggtctcaaagccagcgaccgcgcctcgtgcctggaagcaaaactccagcct

SEQ ID NO: 1461 - DNA, 277 bp, Glycine max
  unsure (1)..(277): unsure at all n locations; Clone ID: 700555165H1
cagccatcagagaatgtgatattggtcaggtggaaccttaggggtgtgccacgggttccttgggaggccaaaggagagtttcagggcacctcaaggtacaaattggacagaaatggaaaaatttatgaacacaaagttgataatttggcatcaatttccctcagaatattaaaccagtttcagttttggattggttactgcagccctgcaagtccaaatcctacnttttntggggtcntgtggtgcatactcctcctcaagggatagcctttacnag

SEQ ID NO: 1462 - DNA, 97 bp, Glycine max
  unsure (1)..(97): unsure at all n locations; Clone ID: 700555166H1
ctccgangccggctaacaacaacacaaggcccatcatcatggcagctgcttnctcctntggcaagcacaactcaagtccaccttcactaaaactnct

SEQ ID NO: 1463 - DNA, 216 bp, Glycine max
  Clone ID: 700555167H1
tgaagccatcgatgctcagatctctccactccgccgccacccgcggcgcctctcatctcttccgccgtgggtacgcctccgagccggtgccggagcgcaaggtagccgttctcggcgcccgccggcgggatcgggcagcctctctccttctcatgaaagctcatccctcgtttcgagcctctccctttacgatatcgccggaactcccggcgtcgc

SEQ ID NO: 1464 - DNA, 186 bp, Glycine max
  unsure (1)..(186): unsure at all n locations; Clone ID: 700555169H1
gtcaccaaacatttttnttccatgaactttgcatctttctatcatcacatccatggccacagttgtgaagctccacgttttcccagaaagtttgaaccaacacaaaacgaggttgctcaggagaggctttggctcatgcccttcacctggggtgcttggttttggccataaaaattatgatcagtt

SEQ ID NO: 1465 - DNA, 283 bp, Glycine max
  Clone ID: 700555170H1
gaaaagagaagaaacaaaacaaaaaagagcagagagagagaggaaccatcaccaaccctaatttcttagctaaaccctattcgtttagcatttcctctcttttctcccactcgtaaatcctctcccaaacttttcagatccaaataaatcatggttttctgggtttttggctacggttcactggtgtggaaccctggattcgattacaatgagaagattataggtttcattaaggatacagacgcgtgtttgatttagcgtgcatgatcaccggggaacacct

SEQ ID NO: 1466 - DNA, 289 bp, Glycine max
  unsure (1)..(289): unsure at all n locations; Clone ID: 700555171H1
gtaagatagaagaancngaataagagaggggtattcgaagaaganaccatgaatctcctctccctctaaactctctctcagattcgatcctctcttctcttctttcaattccgctcccctcgcacgaanatgacagggtttcctcaacctcgccgcgatcannnnnnnnnnnnnnnnnnnnnnnnnnngcacattccaacagcagtggtagnnatgtatttaatttgcttgcaaggaggaagatctcgccccgatcaagatatgtggcaaaaaggcattggggagaacc

SEQ ID NO: 1467 - DNA, 288 bp, Glycine max
  unsure (1)..(288): unsure at all n locations; Clone ID: 700555172H1
gtcagcttcgcaccgccatgaacgccattgcaactgctgcacttctcngctctccctttctccttctccaaatcatccaagcttgacaccaaaaagggtttgaaaggaaggtttagagtgtttgctgtatatggagaagagatagataagaagagtacatggagtgcgctctttgatgtggaggatccaagatccaaagtgccgcagtataaagggaagtttttggatgtatatcaagccttgaatttgcaagatatgatattcaatactgtgattggcgagctcgcc

SEQ ID NO: 1468 - DNA, 286 bp, Glycine max
  unsure (1)..(286): unsure at all n locations; Clone ID: 700555173H1
ggnctgccaagaatctggcagctgtcaacccagaaaggaccatctttgatgtcaagagacttattggaagaaagttcgaagataaggaagttcaaagagatatgaagcttgttccttataagattgtcaacaaggatggaaaacctacatacaagtgaaaattaaggatggtgagaccaaggtgttcagccctgaggaaatcagtgccatgattctgactaagatgaaggaaactgcgnaagcattccttggaaagaaantaagatgccgtggtcatgtcccagct

SEQ ID NO: 1469 - DNA, 283 bp, Glycine max
  unsure (1)..(283): unsure at all n locations; Clone ID: 700555176H1
cactcacctgcctcttcctcacccctttctccatctaacgagtaaggnaaaatggcgcgtaagaagatcagagagtatgactcaaagaggttgttgaaggagcactttaagagactttctggcaaggagttgccgatcaagtctgcacaaattactgcatcaactgatttcactgagctacaagagaaggaaccctggctttcatcttctaaattggttgtgaaacctgacatgttattggaaagcgtggcaaaagtggtttggttgcctaaattggatttgc

SEQ ID NO: 1470 - DNA, 288 bp, Glycine max
  unsure (1)..(288): unsure at all n locations; Clone ID: 700555177H1
cnatttttgtnttttttttttcaatttttaatctcctatccctttttttaattttggaatcgaaatatctaattctaaataatccaaaaattcactcttaatcttgacagtgatatatgttgtatatgtaaatcctagatgtaaaaataggcagacttctcccgggaaaaaaagtnggtaaaaaaatatgctaagtataaattgtctactgatgaaatacgaaagctgatgatattgaaaaaaaaagnattgtaaataaggttcaggttcgacttccatagagaatat

SEQ ID NO: 1471 - DNA, 189 bp, Glycine max
  Clone ID: 700555179H1
gttaggtcagctggccttttgatctgcactgcaggggcctcaacaccaacacttttactgcttgatttaactcctaaaaagtcacaaaaggctggttcttcagttgatgaatttttgcggtccttgtgtctcgaaaagtatctcataacttttcaggctgaagaagttgatatgacagctctcaatcat

SEQ ID NO: 1472 - DNA, 291 bp, Glycine max
  unsure (1)..(291): unsure at all n locations; Clone ID: 700555180H1
cnaaaccctagccattgaatttgggcacggatcttctcccacgctatctcaggtaacatgcctgagaatccactgcagaccttgttccataacattgaacaagtctcaagctttgttcaacaccatctctctaatttcataggccttcatcaccacccatcttcaggacccctcttgtccatctcttcctccaccaaaggcccactttcaaaaactgcaacttctgtacaactcgctgatactgctgtcaaggaaaagtctgctgccccagtgactaaggaagagcttgga

SEQ ID NO: 1473 - DNA, 183 bp, Glycine max
  unsure (1)..(183): unsure at all n locations; Clone ID: 700555181H1
cttcttctcttaaaagagcctttgctttttctttaggcctttccgaattaagtacttgtntcattttctctccgaagcaagaaaaatgttcatcgagagtttcaaggttgagagtcctaacgtgaagtacacagagactgagattcagtccgtgtacaactatgaaaccactgancntgttca

SEQ ID NO: 1474 - DNA, 283 bp, Glycine max
  Clone ID: 700555182H1
acatttcattacttctaccaagctactacatttttaacttcctctttctacatttcattcaaaacaatcatggcttctcttcattccattacattttcaacaaaaactgtcctttatgtatttgtattggcctcttccatcgcagcctctgctggcaacttctaccaggattttggacgtaacttggggagatggtcgtgccaagatactcaacaacggcgatcttctcaactctttcccttgacaaggcctctggctcggggtttcaagtccaaaaacgagt

SEQ ID NO: 1475 - DNA, 278 bp, Glycine max
  unsure (1)..(278): unsure at all n locations; Clone ID: 700555183H1
tgctgtgattgctgactggtttcaaaataatcgtgatcttatgcccataaagtcgcagtttgatagtctaattagagaaggctcctcagaatggaggaacctatgtgaaaatgatgcctatagagagcggttccctgacagcatttgacctggaaacagtcattcaagcaaaaatacgtccgcttactgtggctcctgggaagtccttcattggtttttttcatcctganggatggatgaaggcagatttgactttcgtatggtgccagtccttttga

SEQ ID NO: 1476 - DNA, 283 bp, Glycine max
  unsure (1)..(283): unsure at all n locations; Clone ID: 700555184H1
cagagggaagggttagggaacaattggagtgcacgaaagcgatgccaaaaaaaccaaacaatcattaacaacagccctaacccccccgacgtctttcaaaactgattcggagcaattaatgtaaaatctatggacatcaacgaggaatcttcattctctctccgtttttgtttgcatcattaatagacccaaatggacccgaacccgacagcctcgctggactccgacccgganccgcttcgcgtgaagaggaagaccctcgaggccgtgctcttgcagtgtc

SEQ ID NO: 1477 - DNA, 286 bp, Glycine max
  unsure (1)..(286): unsure at all n locations; Clone ID: 700555185H1
ctctgaaccagcttaaggctaattgcagtgttagttattttcagantacagcaagagggagcatcagattcaagcatttccttgcatcagaggtcactttccgaaagaagtattgcccattatattcttcactaccaagggtcncagcaagtanagtaggcgactaatttgttcagttgnccacagaggatttaccaaaggaagttgaaaaatctaacatggagacaccagggaaagattcttaaaggattacaaaatgcctgattactactttgacactgtggat

SEQ ID NO: 1478 - DNA, 285 bp, Glycine max
  unsure (1)..(285): unsure at all n locations; Clone ID: 700555186H1
gttcctccaagtccacgttaacctcaacgagaattccgttgttcctagcgatgaactcgttcgccaaattcagaacccgtgtcnnnnnnnnnnnnnnnnnnnnnnnnnnngtaccagcaggtgccggagcaagatgctaataacgacttggaccgcgtagagacaacacgtttcgcaggtacacgtccaacgttaccaaggggagtggcaaaggaacagccattgtctggttcaggacgatctcagagttttggataacgaggctctctataaggcatggctttc

SEQ ID NO: 1479 - DNA, 288 bp, Glycine max
  unsure (1)..(288): unsure at all n locations; Clone ID: 700555187H1
atagcgttgccattctcatcctcttntttctctctctaccattgcccatggatccctacaagcaccggccatccagcgccttcaattctcccttctggactacaaattctggtgctcctatttggaacaacaactcctctttaaccgttggagctagaggtccaattctgctggaggattatcatcttgtggagaagcttgcaaattttgatagggaacgtatcccagaacgtgttgtccatgccaggggcgctagtgcaaagggtttctttgaggtcacccatgaca

SEQ ID NO: 1480 - DNA, 286 bp, Glycine max
  Clone ID: 700555188H1
tctctatcgagtaaattaactatgaagcctaccctactattatccctttccttcctgcctctctttgctttcctggctctttcagaagatgttgaacaagttgtggacataagtggcaaccccattttcccaggtggcacatattacattatgccatcaacttggggcgctgccggtggtggattgaaactaggccggacaggaaactcaaactgcccagttactgttttgcaagattactcagaaatcttccgtggcacaccagtcaaattcagcatacctggga

SEQ ID NO: 1481 - DNA, 93 bp, Glycine max
  unsure (1)..(93): unsure at all n locations; Clone ID: 700555189H1
atggccaccacnnagagaggcagcccgcagcagaagttgccgcccacaaactgacctnanactattgcccgagacgctncgagattgtgaaga

SEQ ID NO: 1482 - DNA, 282 bp, Glycine max
  unsure (1)..(282): unsure at all n locations; Clone ID: 700555191H1
accttagtaacattgccacatattntgttcattttggaattgtgccactaaaattcnattcaattcatctatggctgcctcttcttatgctatgcaatcaatcctggcaaaccctttgatccgcatttccagcgggtctagggtgaaccaatttggcgttcctgctttgcacatgagaaggaatgttggcctgagagttaggtccatggctaaggaagatcaaccaagtgagcngcaaccccagttacaccgccaccatcagtagaacccaagccacagcca

SEQ ID NO: 1483 - DNA, 285 bp, Glycine max
  unsure (1)..(285): unsure at all n locations; Clone ID: 700555192H1
tgctccgcggcttatttggtgacgaaatagggttttgcttgcagctgagatcgagaagaggacgcggcggtgaaagctaccggtgcatgcgatcacaatgggagggtcgcgagttcaantcaacaagcctcacaagtcccgcttctcttccaaatcttctcgcaatcttcataaaacctctgtcaaggacagactcgcaatcgcaaaatcagagcgcaatgtcggcaaaggagctcttgcagctcgaattcagagaaataaatgatacgagatcaaaaaagagct

SEQ ID NO: 1484 - DNA, 178 bp, Glycine max
  Clone ID: 700555193H1
ctgtgaacctcggaggactcaaagagaagcaaggtttgtgcggttgcttgcaggtcaaggcaaacgcacaagcccctccgaagaccatggagaaggttgagaatgatttgccatggttgccgtcgtcgtcgatttcgcacgccccgaggacttttataaatcagttacctgactggag

SEQ ID NO: 1485 - DNA, 287 bp, Glycine max
  unsure (1)..(287): unsure at all n locations; Clone ID: 700555195H1
gaaatttagacgtttctctaactccgatattatcactctccccacttgcacacacacatctctnaantaantgccagccctcattggttcagaagagtgtgcaagctggcacctttgcatgtgaattctatatcagcaggagaggaggaatgaaagattcggataaattaacgtgggatcagggtcgatgtctgagtcccgcacaggcacgttcctcggcctcacagaagcttatggtgtcgctcatgttcttggtttccctcacctacatggcttacactctaaag

SEQ ID NO: 1486 - DNA, 294 bp, Glycine max
  Clone ID: 700555201H1
ttgataaatgtcactgctgataggaaaaaccttgcaaagacagaaaaagttctgagcaaatttgttgatctgcttcctactagctctcccattgcaacaactacttggaatgttagacttccattgacaaatgaagctatcgtgattcctactcaggttaattacattgggaaagcagccaacatttatgatactggttatcggcttaatgggagtgcatatgttatttccaaatacattagcaatacaggttgtgggatcgtgtacgtgttagtggtgagcttatggaggttt

SEQ ID NO: 1487 - DNA, 290 bp, Glycine max
  unsure (1)..(290): unsure at all n locations; Clone ID: 700555202H1
accagatgctcaatgcaaccacagaatgataatcttcattcttctattcagtttgataacactgcatttccactacaaaaccagctncatgagtgcttcacaccattctcagtttccaagaaatgaaaatgggctaactcttggtacacgacaaccagccactcctggatttcagaatgtcagcatttcaaatcctaattatagaggattggaggactacttcccagaggatgagattcgaactagaagtcagagatgctagaaangaagatatcagcatctgctccgta

SEQ ID NO: 1488 - DNA, 291 bp, Glycine max
  unsure (1)..(291): unsure at all n locations; Clone ID: 700555203H1
atcagcgtgtctgaaattgagaaatttgagcagaggaggaggagcatttaggtgtgggcgttattcgaagttgatacatgcnnnnnnnnnnnnnnnnnnnnnnnnnnnnnnnntgccgagttctagaatctctaggccgctctctgaaatactgaaagagctgaacaagaaagtaccggactccctcgtcaaaacccgcctccagaaagatncaagatgcctcccccatccagattcattccctggncngttgtcaatcgcntttgaattacagncctgcgtggtctggtg

SEQ ID NO: 1489 - DNA, 260 bp, Glycine max
  unsure (1)..(260): unsure at all n locations; Clone ID: 700555204H1
ctccgagagaganactcacgacttcatgaacgtcgactcgttctcccaactccccttcatccgcccggctcctcttgtcagagagaagtcaggcattcgcctctttggcatcgaatttgccggcggannnnnnnnnnnnnnnnnnnnnnntaacaattttgttgttgtctcggccgaggattctgagtcggccgaaataacaacagcagccaacaccaacaccaacatcaatancaacaaatcaacattcgacctcgatc

SEQ ID NO: 1490 - DNA, 289 bp, Glycine max
  Clone ID: 700555205H1
gggagaattgaggttggagttggagtgagtaacccagcacagcaatggcattgagactgagactcaaagtgtcttcaattgggtcaccttttctgcagttaggttcttctgcaagtgcagcatgctctgtttccaaacttggttttcatccaccacgcttgcaactcaacaaaaattcacacccaataaggctttttgttcgggctgctagaattgagtccaaaggtgttaccttgggtttcaggaccccacaattcagcttccggagccccttccgggacgacctgga

SEQ ID NO: 1491 - DNA, 289 bp, Glycine max
  unsure (1)..(289): unsure at all n locations; Clone ID: 700555206H1
ctttatcatcaccagtgttccatatttcagagaanntcggctttattcatctccctctctagtgttcaccgtacagaggtgtcaaccggagctggtggctcctgctaaacccactcctcgcgaagttaaacccctctccgacatagatgaccaacagggcttgcgtttccaaattccattcannctattctatggtaatgaaccatcaatggcagggaaagaccctgctaaggtcattagagaggcacttgcgcaaactcttgttttttactacctttgcgggtaggat

SEQ ID NO: 1492 - DNA, 287 bp, Glycine max
  unsure (1)..(287): unsure at all n locations; Clone ID: 700555207H1
caatttcccaattcacgcgtttctttcctttcaagactctctctctcgctctagttttttcgttccgcgactncagcctttcgaatcctctcacccagaggtacgattcgtaccatgtagttgtgggatttcggctttgccacttcttgattccaataattttggtttctttttttcccctaatttgatttccccagttagggtttttaactctattcgatcggcgattcgaatactcggaggctcgaatcgtgttgggggttttccgttttataaaaaagtttccg

SEQ ID NO: 1493 - DNA, 288 bp, Glycine max
  unsure (1)..(288): unsure at all n locations; Clone ID: 700555208H1
ctccagaaaggtgccgaagttgaccccaaagatcgatgggggagcacgcctcttgcagatgctattttttacaaaaagaatgacgtgatcaaactattggagaagcatggagcaaagcttctgatggcccctatgcatgttaatcatgcacgtgaagtcccagagtatgaaatcaatcctaaagagcttgattttaccaacagtgtggagataacaaaggggactttctgtattgcactgtggcgtggaacagaggttgcagtaaaaaagctgggaggatgtantagt

SEQ ID NO: 1494 - DNA, 283 bp, Glycine max
  unsure (1)..(283): unsure at all n locations; Clone ID: 700555209H1
ctcgaaggagagagaaattagagagagaaaggtgtgagtgtttgttttttagagagagaaagagtgtgagtgttgtgttgagtgcagtttctttctcacatggcctctatgccgttggggccgcagcaacagcttnnnnnnnnnnnnnnnnnnnnnnnnnnnccagcggagaatgacgcgatgaaagtggactctcgcggcggctccgacgccggcaccgaaaaggaatgtcagctacctgtccgcactggtatgatgcatcatggtcataatctcaaccaca

SEQ ID NO: 1495 - DNA, 279 bp, Glycine max
  Clone ID: 700555211H1
ggttgctccattcactggcctcaagtccatggctggcttccccaccaggaagaccaacaatgacattacctccattgctagcaacggtggaagagtgcaatgcatgcaggtgtggccaccagttggcaagaagaagtttgagactctttcctacctgccagaccttgatgatgcacaattggcaaaggaagtagaataccttcttaggaagggatggattcctgcttggattcgagttggagcaggtttcgtgtaccgtgagcaccagtcaccaggata

SEQ ID NO: 1496 - DNA, 287 bp, Glycine max
  Clone ID: 700555212H1
attgcacaatgtcaacctcttccataaacgggtggtgcctctcttccatctccccagccaaaacctctctccaggaaggccacattacgcccttccgtcttcgcaacccttaacactccttcttctccttcctcttcatcttccttcccctctctcattcaagacaggcctgtttttgctgcccctgcccccatcatcaccccaactgtgagagaggatatggcaaaggaatacgagaaagctattgaagaacttcagaaattgttgaggggaagagtgaattcaaa

SEQ ID NO: 1497 - DNA, 284 bp, Glycine max
  Clone ID: 700555213H1
caaaaccctcttttttctctctcttgcaaaacctaattttcatttcttccctcaaatttcaaaatgcgtgagatccttcacatccagggtggccaatgcggcaaccagatcggcgccaagttctgggaggtggtttgcgcggagcacgggatcgaccctaccggaaggtacggtggggactcggagttgcagctcgagaggatcaatgtctactacaacgaggccagttgcggtcggttcgtgccgcgcgcggttctcatggacctcgacgggcaccatggaca

SEQ ID NO: 1498 - DNA, 282 bp, Glycine max
  Clone ID: 700555214H1
gcaggtctggcttgtgaaggtcttaaacctttctgtgcaatttactcatcattcatgcagagggcttatgaccaggtggtgcatgatgtggatttgcagaagctgcctgtaagatttgcaatggacagggctggattagttggagcagatggtcccacacattgtggttcttttgatgtcacatttatggcatgcctgcctaacatggtggtgatggctcctctgatgaagccgacctttccacaggttgccaccgcagcagccatatgatcgacctagttg

SEQ ID NO: 1499 - DNA, 191 bp, Glycine max
  unsure (1)..(191): unsure at all n locations; Clone ID: 700555215H1
cacgcgaggngggaggaatgcgcgctcactcctccgcaaattcaaactacaattctctctctttccctctttcttcttctcgcaccaccctctctnacnngatccaactccctcaaaccctaacgctccaaaacaaaaaaaaacccctcgctcttaaatttcatcttcngacactcatcaaancacatcta

SEQ ID NO: 1500 - DNA, 284 bp, Glycine max
  unsure (1)..(284): unsure at all n locations; Clone ID: 700555216H1
gnggaaggagcgaatgatggtttttctggacctggaccaaatgattcgcttcttcctggtcttattgatgatgttgccttgaattgtcttgcttggcttagtggatccgattatgccgcactatcgtgtatcaataaaaagttcaataaactgatcaatagtgggtatctatatgggttgaggaaacaattgggggctgtggagcatttggtgtatatggtttgtgatccaagaggatgggtggccttgaccccaagataaacaggtggatcatacccaagata

SEQ ID NO: 1501 - DNA, 285 bp, Glycine max
  Clone ID: 700555217H1
ctagcacacaaaacttgctatagcagtaagctataactcatttgaggctctgtgagaattgagaaatggctaaagatgttgaggttcaagagcaaggaggagagtactctgccaaagactaccatgaccctcctccagcacctttgttcgacccagaggagctcacacagtggtccttctatagagccctcatcgctgagttcatagcaaccctctgctccttatgtcatgtgctcaccatatggctacaaaaggcagactgatacaaggagtggcacggatgtg

SEQ ID NO: 1502 - DNA, 260 bp, Glycine max
  unsure (1)..(260): unsure at all n locations; Clone ID: 700555219H1
ctcttcttcgtcgctggccttgcctttcaagatccaaacctcttcccaatgaggaannnnnnnnnnnnnnnnnnnnnnnnnnnnnnnnnnnnngccgccgtcagatctgatccctcagatcaccgctacaaagaaggcgaccccgtccctctctgcgccaacaaagttggccccttccacaaccctagcgantnctaccgttacttcgaccttcccttttgtgaaccaggtgatttgaaagagaaaggaggcgctcgggg

SEQ ID NO: 1503 - DNA, 283 bp, Glycine max
  Clone ID: 700555220H1
cagatcaaacgcacacagttacgctcttcaaatcaatctcttctcagaaatgggtgtggctcaaaacattcccgatgcggaggagggaaccttggagattggaatggaatacagaactgtgtctggagttgctgggccattggtcattcttgataaagttaagggacctaagtttcaagagattgttaatattcgcttgggagatggaactactcggcgtggacaagtgctagaagttgatggtgaaaaggctgttgttcagtcttgagtacatctgggatga

SEQ ID NO: 1504 - DNA, 287 bp, Glycine max
  Clone ID: 700555221H1
caagtagttgagaactaagaaggagaagcaaatggcttcctcaatgatctcttccccagctgttaccactgtcaaccgtgccggtgccggcatggttgctccattcactggcctcaagtccatggctggcttccccaccaggaagaccaacaatgacattacctccattgctagcaacggtggaagagtgcaatgcatgcaggtgtggccaccagttggcaagaagaagtttgagactctttcctacctgccagaccttgatgatgcacattgcaaaggaagtagat

SEQ ID NO: 1505 - DNA, 285 bp, Glycine max
  unsure (1)..(285): unsure at all n locations; Clone ID: 700555222H1
gggacattgtcagttcccttgcctcaaagacctttgggtgatgaatcaataaccttgggaccaatgggtggccttgccagaggaatgtccattagaggtccacctgcagtttcaagttcaactggtcttaataatggttataataatttgtcagagcgcacttcatacagctctagggaggaccctgcatcaagatatactccagatagatttgctggttcgactgcttacgatcaatctattgttncaagatcgtaatatgaataggtaagggactgagaaatg

SEQ ID NO: 1506 - DNA, 247 bp, Glycine max
  Clone ID: 700555223H1
tgaatcgcgattgttctgtgcgagagaaagaagagagagatcgaaaatggcgttggctttcgacgagttcggaaggccgttcataatcctgaaggagcaggagcagaagagcagactccgaggattggacgctcagaaagccaacatctccgccggcaaagccgtggctcgcatcctccgaacctccctcggccccaaaggcatggacaagatgctccagagccccgacggcggtcaccatcacgaa

SEQ ID NO: 1507 - DNA, 190 bp, Glycine max
  Clone ID: 700555224H1
caccaccaccgcttcctattcctcctcccaacccaataaacaacctgcatggacccaccaaccctcccccactcagaccaccgccttgcccggtggccccccctccatggtcggagacatcttcggcaagagctggggaacccctcaaccttcttctgcttccaaaaacatcgggatgctcaataagaac

SEQ ID NO: 1508 - DNA, 282 bp, Glycine max
  Clone ID: 700555226H1
gcttcaccttctgctctagaaaattcagtgctgaaacatggcttcggctactctctctgtagccaaaccagcccttcaggcaaatgggaaaggcttctctgaattctctggcctccgaagctcatcaggcttccttcccttttctagaaaatcttcagaggatttccattctgtcattgccttccagacctatgcagttggaagcagtggaggatacaagaagggtgtgacagaagcaaaactgaaggttgccataaacgggtttggagatggaaggaattc

SEQ ID NO: 1509 - DNA, 284 bp, Glycine max
  unsure (1)..(284): unsure at all n locations; Clone ID: 700555227H1
agctacctcctccattcttcatttccattaccaaaaagaaancaccaaactctctataaccataaccatgtcaatggcaacaacatcccctcacaccggcctcttccaaaaccgcaccaaaccttcttttcctttctcttcttcctccttcaagttcaaacccacatccatcaaatgctcccacccaactccacaccnaagctccgcncctcacccactcccaagatcgcgtcttcaattcgccgccggccccgccaccctcccggaaagtcctcctccgcgcc

SEQ ID NO: 1510 - DNA, 284 bp, Glycine max
  unsure (1)..(284): unsure at all n locations; Clone ID: 700555228H1
aatccacctaaatacacgtggttctataattttgtgaagcatggtggtgggaccatgaagttgagcagttcatntgttgatcctggaagagagtggaggctctttgttagcaaaagttgcaagaggcagcgcaaggataggagagtgaccattgtcaatgaacttggaggacaatatgaggacacttttgaagatgttaaagcgcaaatgctcaactatttcacatacaaggctgtgaggactgttctgcatcagttgtatgagatgatccacctaaatacacg

SEQ ID NO: 1511 - DNA, 283 bp, Glycine max
  unsure (1)..(283): unsure at all n locations; Clone ID: 700555229H1
cgccgagaaaaccctaattcgctcgcagtcacccaagaggcgaatccttaccattgctncgagatgggtgaagaagtgaaggccgtggttccagagtctgttttgaagaagcagaagagagaggaggaatgggcgttggccaagaagcaagacctcgaggctgcgaagaagaagagagccgagagccgcaaactcatctnacaacagagctaagcattacgctcaaggagtacgatccaccaggagaaggcattgatttcggttgaacgcgaggccaagctga

SEQ ID NO: 1512 - DNA, 285 bp, Glycine max
  unsure (1)..(285): unsure at all n locations; Clone ID: 700555230H1
gcgtctctctctcacctcaacaaactcctctgcatgccgccgctcaactcttcaccctctacttcgccaccgcgcagcagcgtcggagtttcgaccaaatctgtcggaaggccgaggatggtcgccgatttcgcgaggccggtggggcgtgtccgagcggtgacgagcgacgacgagtggggcccnnnnnnnnnnnnnnnnncatacggcggaggagtggcggtggaggagaaaccgacggagacggaaacggagaagctgaagaagcttggtggattcgtttta

SEQ ID NO: 1513 - DNA, 282 bp, Glycine max
  Clone ID: 700555231H1
aaagttggtcacttctaatcttctcgagagcatagaaacagattcagagtactttctgatacctgacatccctgacaaaattgagatcaccaaagaacagacgtcaagaccaatgcatgaaaactggagcgagtttgtcgacaaaatggcggcggcggaagcggttacttatggcgtggtcgtgaattctttgaggagttggagccagcatatgcaggggatttcaagaagatcagaaacgataaagtgtggtgtgttggcccgtttctcagaaacaggaat

SEQ ID NO: 1514 - DNA, 289 bp, Glycine max
  unsure (1)..(289): unsure at all n locations; Clone ID: 700555232H1
cgttaaagtggaaagtgaaggaaaaggttggaataaatgaagcctcaactcaacgttgctgttgctcttgttattagcttgctnctgtattcagcactcattttgtgatgaaccttctgatactggactaaacaagtggaaatgtagatgctcttcattacaagggaacaagatatactctcttgctaattgttccaagtcatgtgattgccatccagatgctgaagagaatgcatccatatggacatgcgatgtgcatccaaacgggtttcnaaagtgacagcagatg

SEQ ID NO: 1515 - DNA, 101 bp, Glycine max
  unsure (1)..(101): unsure at all n locations; Clone ID: 700555233H1
gnatcatctctaaacttccttctaaggaaaaacaaaaaaaatatggagaaaaggttgtttttggtggtttcnncccctctatttcccacatcncttccaat

SEQ ID NO: 1516 - DNA, 289 bp, Glycine max
  unsure (1)..(289): unsure at all n locations; Clone ID: 700555234H1
tagagtgcccaaaagtcaacaatttcgattcttgccccgttcatcatcattacttcttcttcattcattacccccaaccttttactcgtgctctctatccagaggggatctatgaccaactgatgatggatggtggctgggtattcacctgaatttgttcattcgtgataccctttgattgagtatccgagcaggttaggaagaatttagttggggaattataattttgctgtgagtggaataagaatcttgatagggtctgtttgtattcttgaagtctgatttnttt

SEQ ID NO: 1517 - DNA, 285 bp, Glycine max
  unsure (1)..(285): unsure at all n locations; Clone ID: 700555235H1
ggnaggaagatatggtcctcgtccagctgaggaggctgcaatttctgcactaaagagagctnngggtgctttgaacacacaccttgcttccaatacttacctggttgggcattctgtgaccctggccgacatcataatgacatgcaatttgtatttgggttttgcaaacatcctggttaagagctttacctctgagtttcctcatgttgagagatactttggacctggtcaatcagccaaacttccgaaaaataattgggcagtcaagcggctgaagctattcct

SEQ ID NO: 1518 - DNA, 285 bp, Glycine max
  Clone ID: 700555236H1
gcaagtgaagcaatggctcaaaccatgttgctcatgtctagtgtctctagcagttattccgtggatttgaagaaagaccttttcctccaattgcagagtcaaagtttaaggcctaagttctctcaactctcattcaacccacttccaccatcaacttcttccttttcttcaccccgtacattcacaaccctggctctcttcaaatctaagacaaaagccgctcctgctaagactaaggttacaaagccaaagcaaaaggttgaagatggtatttggcattctgga

SEQ ID NO: 1519 - DNA, 283 bp, Glycine max
  unsure (1)..(283): unsure at all n locations; Clone ID: 700555237H1
aatcctcttcctcttccctcaaatcataacacattttctctctttcccttctctgttccgttccttctcgcgcgatttgcatattccgaaattgagaaccccacccgcgcgaaaattgaaggcagagaagggcaaaagatttgatctttcaaacgaggagtttctggggtgtcccaggatgaggctaaacggtgaaatctcaagcnnnnnnnnnnnnnnnnnnnnnnnnnnnacgggaacgacgncgttttcgtcgcagaaatggtcgtgctagctttaacgt

SEQ ID NO: 1520 - DNA, 297 bp, Glycine max
  unsure (1)..(297): unsure at all n locations; Clone ID: 700555238H1
ggaggagaagagtacctcttcaagatcgtcataatcggagactctgcggtgggcaaatccaaccttctctcccgctacgcccggaacgagttcaacatgcactccaaggccaccataggtgtcgagttccagactcagtgcttggaaatcgactccaaggaagtcaaggctcagatttgggacaccgccggccaagagcgattccgcgccgtccacctaccgccttactcaccgcggcgctgtcggcgccctncatgtctcacgacatcttcccgccgaccacctttcggattagcg

SEQ ID NO: 1521 - DNA, 280 bp, Glycine max
  Clone ID: 700555239H1
aacgatttctcaacactctatgcacctctcatccgtgatgggcgtatggagaagttctactgggcaccaacaagggaagaccgcattggtgtttgcaccggaattttccgcactgatggtattcctgaacaggacattgtcaagcttgttgacaccttccctggccaatccattgatttctttggtgcactgagggccagagtatatgatgatgaagtgaggaagtggattctggtgttggtgttgacatgttgggaagaagctgtaactcaaaagagga

SEQ ID NO: 1522 - DNA, 283 bp, Glycine max
  Clone ID: 700555240H1
cttattcaggaatttggagagactgttgatatagaaaggtaggataaaccagtggccaaggaatatatggcgttttctatggttttcattgttagcaacattatgctgcttttcagttcagcatttgccaaaactgctagtcctccctctctgagcccaactccagcaccagccccggcacccgactacgtgaacctcaccgagttgctacagtgttgctggtccattcacaccttcctggataccttgagtccaccaaagtgatgacattccaaaaccaagc

SEQ ID NO: 1523 - DNA, 244 bp, Glycine max
  unsure (1)..(244): unsure at all n locations; Clone ID: 700555241H1
aagaagctaatgctaaaggtgatggagatgaagatgaaaatgaaggtaataacgatgaaaatggaaatcaaggtgaagatgatattacattcaagaagcttgagagtttgactctagctcgttaccaaaactagaagctctacacagggagttcctctttgaattttccatgctgaaataatgtcgttcagcaaacctgcagcacgaaactttccgtcttttgacatgtacgaacantgagatg

SEQ ID NO: 1524 - DNA, 278 bp, Glycine max
  Clone ID: 700555243H1
atttaggaatatgtccaaaattgaacacactcagcattgaagcaccgtttatggtttcacttgagttgaaaggatgtggtgtactatctgaagcattcattaattgtccactcttagcatctctcgatgcttccttttgcagccaactaacggatggctgcttgtctgcaacaactgtctcatgcccactgattgaatcattgatattaatgtcatgctcatcaattggttcagagggtcttcgatctctgtatgtctccaaatgactgttctggact

SEQ ID NO: 1525 - DNA, 276 bp, Glycine max
  Clone ID: 700555244H1
gcacaaagagaagcattagcactaggagcagcaacaactagtctcagctgaaatggcctcttccagtgatggcatctgtggccctcaaacctgcccctttcactgttgagaagtcctcagtgagaggccttccctctctctcaaggaactcttcttcattcagagttgtggccagtggcaagaagatcaagactgacaaaccttatggaattaatggtggcaggcttgagggaggaatgatgcatcggcaggaaaggaaaggaggtgtttaccatt

SEQ ID NO: 1526 - DNA, 273 bp, Glycine max
  unsure (1)..(273): unsure at all n locations; Clone ID: 700555245H1
atcgagataactagaaacagtgtgatgaaaatgaaggtccttgttttcttcnntgctacaattttggtagcatggcaatgccatgcgtacgatatgttccctctccgaatgaacactggctatggtgcccgtactccggaggtgaaatgcgcaagttggaggcttgctgtggaagcacacaacatctttggctttgagaccatcctgaagagtgcgttgaagcaacaaaggaatacatccatggcgaacaatataganagactccaaaacatt

SEQ ID NO: 1527 - DNA, 277 bp, Glycine max
  unsure (1)..(277): unsure at all n locations; Clone ID: 700555246H1
tctctcgtcccacctcctgcttcatcagcagacaatcaatcccatagcattggaaatttgcctagggccacaaatcccatcagtgcctcctcctgcttcatcagctgattcagagtatgagaagttcatggcagagatgaaatgattttgatcaattttggttcagtgttccaaaaggcctgatgtttcttggagctcttgtgaacctgatttctaacctcttgccagtcttcttcgaatttgggactcacttctttaacctggtactgttagaant

SEQ ID NO: 1528 - DNA, 281 bp, Glycine max
  unsure (1)..(281): unsure at all n locations; Clone ID: 700555247H1
gaacaaccaacaacaagttcacattgtaggaacctttgtcttgtcgtgtcgggtagtggctcatattgatattggtatggtctttctttgaaccccatttgcannnnnnnnnnnnnnnnnnnnnnnnnttcagtgtgatgtgtgtgagaaagcccctgcaaccgtgatttgttgcgcagatgaggcagctttgtgtgccaaatgtgacgttgaagttcatgctgcaaacaagctgcaagcaagcaccagaggctctcctcaatgtcntcaaacaagctccc

SEQ ID NO: 1529 - DNA, 277 bp, Glycine max
  unsure (1)..(277): unsure at all n locations; Clone ID: 700555248H1
tttcattgagtatctgcatacaagagacatgaaagctgcttataaacaagctgntggtaggaaaattgatggtagaagggtgcttgtggatgttgagcgtgggaggactgttccaaattggagaccccgtcgcttaggtggtggacttggtaccgctagagttggaggtgaagaagttaatcagcgacattctgggagggagcaacaacagtctcgttctgaagaaccgagagtgcgagaggaccgacacgctgatagagcnggaaatatccacgtg

SEQ ID NO: 1530 - DNA, 288 bp, Glycine max
  unsure (1)..(288): unsure at all n locations; Clone ID: 700555249H1
gaaagaaccaatagtaaaccctccttatcagctatcactttgaaaacccgcattcggccaacactatacaataccataaccttatctatcgcaaccacctcccaaatcactctcatccaacttcatctctctcttcccccagttgccagatcngaatcacaccttcactcttgcgatttaattactgagtagttgaggatggctccttttgcttttgcaacattgccctcttctcacatctgccgcctcccaaagcccacaaattgaagtttcgttcgctgctctact

SEQ ID NO: 1531 - DNA, 289 bp, Glycine max
  Clone ID: 700555250H1
acaaggcagaaagcaagctcatcctagagttttaaaaatggcagcagcctcctccatgggctctctcttccccatccttggctggcaaggccgtgaagctgggcccatcagcccccgaagtcgggagggtcagcatgaggaagaccgtcaccaagcaggcctcctccggaagcccatggtaacggcccagaccgcgtcaagtacttgggcccattctctggcgagcccccgtcctaaccttcactggcgattcccaggtgattacggctgggactgctgggctttcggc

SEQ ID NO: 1532 - DNA, 283 bp, Glycine max
  unsure (1)..(283): unsure at all n locations; Clone ID: 700555251H1
gggactttcctcgagatcaatttcagattgccacaaagtttgggattgtcanaatggaaaatggtaatgtgatagtgaacggttcccctgaatatgttcggtcctgttgcgagggtagcctccaacgccttggtgtcagctacattgatctctattatcagcaccgtgttgacnnaactgtacccattgaagacaccatgggagagcttaaaaggctggtccaagaggganaaataaggtacataggatgtcggnagctagccctgacaattaggaggcactg

SEQ ID NO: 1533 - DNA, 286 bp, Glycine max
  Clone ID: 700555253H1
tttaaagaaatcaacacacacaaacacaacaacatatggaggtgctaagggtgcaaaccatagcttccaaatccaaagatgctgccatcccagccatgtttgttagggcagagacagagcaaccaggcatcacaaccgttcaaggggtgaaccttgaggtgcctattattgattttagtgacccagatgaagggaaagtggtgcatgagattttggaggcaagtagggactggggcatgttccaaattgtgaaccatgacatacctagtgtgttataagaaagttg

SEQ ID NO: 1534 - DNA, 285 bp, Glycine max
  Clone ID: 700555254H1
gctttatctggaactgctggttctcatagtctctgaaagcagaggagttaccgaccaatggccaccattgcttcttcctcatccattgtgctcttctctgcatcctcttccaacctcctcccattttcacacccttctacttcgcgcctttctttctcttcttcccttcactcctcatccttctctctatcaatttctccttcctttttgtccatactattcttcaagttctacacactttgccactcatgctgccttcagcatcagtgcgtgccgccgagaaga

SEQ ID NO: 1535 - DNA, 285 bp, Glycine max
  Clone ID: 700555255H1
atcatggccacctctgctattcagcaatcagcattcgcaggtcaaactgctctgaagcagctcaatgagttggtccgcaagaccggtggcgccggcaaaggtcgcaccaacatgcgccgtaccgtcaagagtgctcctcagagcatttggtatggccctgatcgtcccaagtacctgggtccattctcagagcagattccgtcatacctgaccggagaattccccggtgactcacggatgggacactgctggactatcagctgacccggaccttcgccagtaacc

SEQ ID NO: 1536 - DNA, 285 bp, Glycine max
  unsure (1)..(285): unsure at all n locations; Clone ID: 700555256H1
cacacatacacacactcaaatacatacactagtagtgtggtgtgtgcccttcctttatccttttgcttnctgtgtgcaattaacacacactcacacaaaaatgacggcatgccaagattggccagagccagtgattcgagtccaagccttggctgcaagtggcttagccacaatccccgaacgtttcataaagcctaagtcccaaagacccactaatagtaacaattatgctccaaagaccattcctctccaaattggtcatcataagacattaccaccaacagc

SEQ ID NO: 1537 - DNA, 281 bp, Glycine max
  unsure (1)..(281): unsure at all n locations; Clone ID: 700555257H1
gggactttcctcgagatcaatttcagattgccacaaagtttgggattgtcaaaatggaaaatggtaatgtgatagtgaacggttcccctgaatatgttcggtcctgttgcgagggtagcctccaacgccttggtgtcagctacattgatctctattatcagcaccgtgttgacacaactgtacccattgaagacaccatgggagagcttaaaaggctggtccaagagggaaaaataaggtacataggatgtcggaagctagccctggnacattaggaggca

SEQ ID NO: 1538 - DNA, 274 bp, Glycine max
  unsure (1)..(274): unsure at all n locations; Clone ID: 700555258H1
cccaattataatactaaattcaaaaaaaggagagtaatgagtataatctttcgctcagacgatgtactgatatattctatggcggaggttcgaagaacaagcaatttattttgggccgttttcactttgttaggttcattggggttattgttcgttgcaatttaccagttatcttggtatggattgttctttatttctgagaaaatagtgattttctttattccggacttatttattttccattatccacacaanaanantgcaaacananaaa

SEQ ID NO: 1539 - DNA, 279 bp, Glycine max
  unsure (1)..(279): unsure at all n locations; Clone ID: 700555259H1
gnaatattggtaaagatacaatttcagagaaaataaacagtgatgaagaccagcagaggcctaagaagaaactagaagaggattgtccctatattgatttggaggcaaatattgatgatcaagaaacagttgctgcaagcaattttagtaaggataaaaattcaggaacaattattgttgatgaagatcagcaaaggcccaagaggaaacagaaagataatcattatattgactggaggcaacactgaagatcaagaaacaggtggtaagcaatatata

SEQ ID NO: 1540 - DNA, 281 bp, Glycine max
  unsure (1)..(281): unsure at all n locations; Clone ID: 700555260H1
aagtagttgagaactaagaaggagaagcaaatggcttcctcaatgatctcttccccagctgttaccactgtcaaccgtgccggtgccggcatggttgctccattcactggcctcaagtccatggctggcttccccaccaggaagaccaacaatgacattacctccattgctagcaacggtggaagagtgcaatgcatgcaggtgtggccaccagttggcaagaagaatttgagactcttcctacctggccagaccttgatgatgccantgggcaaaggaag

SEQ ID NO: 1541 - DNA, 282 bp, Glycine max
  unsure (1)..(282): unsure at all n locations; Clone ID: 700555261H1
gtaaganagagaaataccaaaaccttggcgcatcatattctttattccctcacttggatcgttaattccgcgaacgagcttctgcccttcaaattaaccatggagaatattggtgaggagtacggctactggccggagaacgacatgcttttccaaaacgaagaccttggcagctgggcgataatggatgaggcagcgttatcagggtcagggtactatgattcaagctccccggacggtactggtgcttcttcatcggtggcatctagaacatgtctccga

SEQ ID NO: 1542 - DNA, 280 bp, Glycine max
  unsure (1)..(280): unsure at all n locations; Clone ID: 700555262H1
cagagcagcaggggctaaaacgactgaagaaaatccttcctgaaggaaagagtgggcaaccaatggattctagcagaagcaatgaatcaagttacaaatacagtcacgctgttaaccataaaggtcatgctgatatttcatccagggatagatttgcaaggagtaatggtattcccatttctataagatataagaagttgggcaacgaggaaataagcatgcaaggagatcaccaccaaagagataggttggcaacagacnttaggacacctcctggagc

SEQ ID NO: 1543 - DNA, 284 bp, Glycine max
  unsure (1)..(284): unsure at all n locations; Clone ID: 700555263H1
catgttcttgtacagtgtcttatattgtttgattacttgaaggcccctggaaaaggtgacaaggatttgccatctgaaaacatgaaagaagagattacatcatgggaggnacgtgttaaaaaacttcttgaactgacaccaccaaaagggacagaatttcttcacaaaattgagcatatattggaacgagaaaaaaattgggtgtggtggaaacgtgatggctgcctcccatatgaaaaacaacgtatagagaagaaagcagtaccagaggcccaagaaacgta

SEQ ID NO: 1544 - DNA, 284 bp, Glycine max
  unsure (1)..(284): unsure at all n locations; Clone ID: 700555264H1
cacatcagcacaacacnncaattcactaagctaaaatcacttcatcatggcttcctcgtgtgcttcctctgccattgcagctgttgccatctccacaccaagttcccagaagaatggatcactcttgggaagcacaaaagcttcttttcttagtgggaggaaactgaaggtgaacaactttacagcaccagttggagcacgatccagcactacagtttgcgcattgctgagcctgataggcctctgtggttcccaggcagcacccctcctcaggctagatggca

SEQ ID NO: 1545 - DNA, 288 bp, Glycine max
  unsure (1)..(288): unsure at all n locations; Clone ID: 700555265H1
cgaagggctatatagcataaacatttgagtcttcattgcacaatgtcgacctcttccattaacgggtggtgcctctcttccatctccccagccaaaacctctctcaagaaggccacattaggcccttctgtcttcgcaaccgttagcannnnnnnnnnnnnnnnnnnnnnnnnnnnnnnnnnnnnnnnnnnnctcattcaagacaggcctgtctttgctgcccctgcccccatcatcaccccaactgtgagagaggataggcaaaggaatacagcaagctattgaaga

SEQ ID NO: 1546 - DNA, 278 bp, Glycine max
  unsure (1)..(278): unsure at all n locations; Clone ID: 700555266H1
ctgngcactgctaggaggaggaagagatcggaatcaaggagtgtatttggggactcaacaccagcaaggccaagtcctcgtggttttgggagcaaaaattgaaaatccctaaagggtttaacacaacaatataatgggaagtctggatcaacaggtcaccggtgatcaacttgtttgatttagcgttattcagctaaaataattctttaccatcatagagcattcatatagctccaacttgtttgattcagcttctcggctaaaagatattaccatat

SEQ ID NO: 1547 - DNA, 288 bp, Glycine max
  unsure (1)..(288): unsure at all n locations; Clone ID: 700555267H1
gttgtggtgtttcatttgtgaaactaacaacaacacaaggccatcatcatggcagctgcttccccaatggcaagccaactcaagtccaccttcactaggactcttgtagctcccaagggcctctctgcctcttcaccacttcacctcgtgccttctagaaggcaatttagcttcactgttaaggccatccaatcagagaagccaacctatcaagtgattcagccaatccaacggtgacccattcattggaagcctggaaaccccagttnacaccagccctttgatcgc

SEQ ID NO: 1548 - DNA, 283 bp, Glycine max
  unsure (1)..(283): unsure at all n locations; Clone ID: 700555268H1
gaaaaattatgtgattataaagttctaaaccctggcaggtttatatattcttaatttctctcagaaagagaactcagcgaggttctgtacacatgtacagtaccccctgtcccactgagcaaaggctttttctcctttgacacaactttgataanaaaaatctgcactgcactgtttcattcagctagctagcttctcatatataccaattgtgtgactgttcatcaaaagtttcagataaatggacacaaaaatgtgctctcaaaaattatcacttgaaggc

SEQ ID NO: 1549 - DNA, 284 bp, Glycine max
  Clone ID: 700555269H1
attttccctcacactcatcattctcaaaaaacacgcccaaattctaatcaaattagggttagggttttcaactcccctcgaattatccctgtaatgcagtgcgattcccgggtcctaccatggagccatcagcaatgtacggaccctcccagcccctgaacatcccctcgcggatcggcgctggcgaaagagacgacggctccggcaacgagcccgccgtcgacggccaccaccaccacattcagtacgaaacgcagcgctcgatgacgtgccgccggtggcgc

SEQ ID NO: 1550 - DNA, 283 bp, Glycine max
  Clone ID: 700555270H1
tccgttgcttttcaaaattccccttcccccaaacggcgtcgtctctaacaagagctttctcacaaagcacctccatgtccataaaccttcactctcacgccttctccggcaaccctctgctctccaaattcccactccccggcaactgatgggaaacttggctattgctggtcatgctaaggcactgctggaatggcataatttttcacgattttgtggccattgtggagagaaaacagtcccaatggaagctgggagacggaagaaattcaaatgattcatg

SEQ ID NO: 1551 - DNA, 236 bp, Glycine max
  unsure (1)..(236): unsure at all n locations; Clone ID: 700555271H1
gagaatgttgagtctctncagttgcttcaccttcttcttcaaccatttcctttctcccaaagccattcaatggcattcagctccgtcgcactgccacatgctccatcccacccacgaagcgcagtcatttgtgccggtggtggtgatgtctaagaggacggaggaattgaaggaaattagacaaatgactacggaacgaattaacgaagaggttgtcgactaagggcgagcttgtt

SEQ ID NO: 1552 - DNA, 218 bp, Glycine max
  Clone ID: 700555272H1
ggaaatcagctccctcgaagactattcttccttcttcttccctgatatggatcccaagcgtcgtggaaacgacaccgctttcaacgacctcctcaattccctcatccacttagacaacaaacaaaccctcatggatcctactcaattccaattcgactcctacccccccaaccaagagacctcgtcgtgccattgaagacatccacaatgtcacggtc

SEQ ID NO: 1553 - DNA, 75 bp, Glycine max
  unsure (1)..(75): unsure at all n locations; Clone ID: 700555273H1
gccagattttcatgaaccaacaccaaatcatggtgtcttatctganggagaaaannaaacttatttcaagggagg

SEQ ID NO: 1554 - DNA, 279 bp, Glycine max
  Clone ID: 700555274H1
ccaaactagcaaaggaatcttccaggatttgacttgaacatattggagctagctgaaattctcttagcaaaaatggactagaatatatgatgtatatcatattataaggatcatgcattgtgctatttggggttggttttcatgacaatcctagtggaagggaacttctatcagagctataatgtgttcatcggttaacttgctaccaagtctactctttaaaccagattactaaatactaataggagaggttatctagttgttcttgtacaggatagt

SEQ ID NO: 1555 - DNA, 279 bp, Glycine max
  Clone ID: 700555275H1
gttcaacggcatcgctactcttattcctaaaagcgcgcgtaagatcgacgacgatctttaccgcgccgttgatatctatctcaaggcgcatccacagttggatgagatagagagagagaaggtgtgcagcgtgatggatccgttgaagctttcatacgaggcgcgtgtgcacgcgtcgcagaacaagcgattgccggtgcagattgtgctgcacgcgcttactacgaccagcttacggctgaggagcggggcggaggagcgtgatggcgacggagaaga

SEQ ID NO: 1556 - DNA, 281 bp, Glycine max
  unsure (1)..(281): unsure at all n locations; Clone ID: 700555276H1
gnaattcactctgtacaattcttcgttcgttctctgcagttatatcctttttgagcttcaatggcggacgctgaaaccttcgctttccaggctgagatcaaccagcttctaagtctcatcatcaacacattctacagcaacaaggagccannnttgcgtgaactgcatcagcaatgcttctgatgctttggataagattcgattcgagagcttaaccgacaagagcaagctcgatgctcanccangagctcttcattcgtctgtgtcgacaaggataacaa

SEQ ID NO: 1557 - DNA, 279 bp, Glycine max
  unsure (1)..(279): unsure at all n locations; Clone ID: 700555278H1
aaaatagaaatatttttcgaaactaattttgtggagatctgtcggagaagaaagaagcgaaaattatcctctttccattcgtcgttcaccttccacttctggtacgcttatttcgtaattgtttattattgtattgtattcttttcttctgggtctgggtggctgttgaaagattatagattagatgatgtgatgtgaaaganatgaatgaatagtttttttggatgacttgtttgtgaggtgagcgcaacagagagagagagcagagagagcagagca

SEQ ID NO: 1558 - DNA, 281 bp, Glycine max
  Clone ID: 700555279H1
aacaatatcataaaaaatacttagttaaaaaaacgaaaatactgtattgcaattgtattgcaattcgaaacgaaatatagttcgagatcattgtattatttttgtactatattaatcttaatcttaattggaacgaaatctttcaaaattggatttctaattcttaatttatattttcgttttttcgttcttttctttttcttagattataatcctaaaacaaaagagttaagtgaattaaaaacccaagggaggttcaggccaagtaaagatatccgagt

SEQ ID NO: 1559 - DNA, 281 bp, Glycine max
  unsure (1)..(281): unsure at all n locations; Clone ID: 700555282H1
aggtaaattggaggangctgtccaactatggcacaaaggcactctcaaaattagtgtccgtatgtnggccttaccatagaatgacagcaggagcatatagtctcntggctgtagtgttgtaccatactggagatttcaaccaggcaactatctatcagcaanaggcactagatattaatgaaagagagcttggactggaccatcctgatacgatgaaaagttatggagatcttgctgttttctattatcgactccaacatacagagtggcttanagtagtt

SEQ ID NO: 1560 - DNA, 283 bp, Glycine max
  unsure (1)..(283): unsure at all n locations; Clone ID: 700555283H1
taatggcatcattcaccatgacagcttccatccttggcagcccagccgtccaccaaccggtcggcagtagcaacgcagaggagatcactcgtagtgaatgctgccaaagctgttgaagcagaaaaggtcagttatgacaatgacatggatggtagcaatggaaggaggaacttgatgttccgccgcggcggcggctgctgtttgctcngttgctgggatggcatggcagatgagcctaaaccaggaaccccagaagccaagaaaaattgctccgatttgtgtc

SEQ ID NO: 1561 - DNA, 287 bp, Glycine max
  unsure (1)..(287): unsure at all n locations; Clone ID: 700555284H1
aaacactcataacacaaagcacaaagcaaagctcatccttgagttaaaaaatggcagcagcttcttccatggctctcctcatccccatccttggctggcaaggccgtgaagctgggcccatcagccccagaagtgggaagggtgagcatgaggaagaccgtcaccaagcaggtctccttcaggaagcccatggtacggcccagaccgagtcaagtacttgggcccattctctggcgagcncccgtccttaccttaaccggtgagttcccagcggattacggctggga

SEQ ID NO: 1562 - DNA, 284 bp, Glycine max
  Clone ID: 700555285H1
taagatggcttcctttgtatccttcctagtgctgcttcttgcagcccttatcctcatgcctccaagggcttgctacttactacaaaccaattaagaagccaccagtgtacaagcctccagtgtacaagccaccagtgtacaaaccaccggtttataagccaaaaccaccggtttacaagccgaaaccaccggtttacaagccaccatataagaagccaccatacaagaaaccaccttatggaaagtaccctccagtagaggacaacacctgcctaaagcaagca

SEQ ID NO: 1563 - DNA, 278 bp, Glycine max
  unsure (1)..(278): unsure at all n locations; Clone ID: 700555286H1
caaatcagagtaattggaacttgaaacttgtcattcattcatggcgattgaggcatggttgatggacgaaagcaatgaagatccaagactccctcaccgccgcaatcccaacaagtcagtttcattggaccaattagcagaatttggggtgttatactggaagctgaatccaactatctatgagaacgatgaagagttggccaagattagagangataggggatacaactacatggacctgctgatttatgcccagaaaagtgaaantnatgaacaga

SEQ ID NO: 1564 - DNA, 273 bp, Glycine max
  unsure (1)..(273): unsure at all n locations; Clone ID: 700555287H1
tgcggctagggttttagcgcanttcttctagatttaaggaagatgggtaaggannaaggttcacatcagtattgtggtcattggccatgtcgactctgggaaatccactaccactggtcacctgatttacaagcttggaggcattgacaagcgtgttattgagaggtttgagaaggaagctgctgagatgaacaagaggtctttcaagtatgcctgggtgctggacaaacttaaggctgagcgtgaaagaggaatcacttgatattgcttgtg

SEQ ID NO: 1565 - DNA, 277 bp, Glycine max
  Clone ID: 700555292H1
gtgggggatggctggcagggaatcaaatcctgcatctttatttcagctttatgttagttatgatcgatatgcagaagctacttatcttttgcttgactgcatagactcatttgcttcgatgagaccagcagatataattagaaggaaaagaccattagctgtttggttcccgtacacaactattgagcggttactataccaactcgatgaattaatcagaatgggtcgcaggtagatcatgtggacaagctcaaaaaaatgttcatgattcttacag

SEQ ID NO: 1566 - DNA, 278 bp, Glycine max
  Clone ID: 700555293H1
gaatattccagctggaaggagaaggaagtaccatgacgacgtgaccgtaattgtaattcatgctagggatgaatcagaggacttcaaaggcatcaacttgcatttaagatttgccaattcttcaaaaaaaataagaaagttaaaaaaacaaaacaaaactttgtacctatgtagcttttcacaggacgctctcgtgttaagtagtatttcctaggttcaagttgtggtatttaaaatgtatatatggcatctacaagaaccatattctatcattgtaa

SEQ ID NO: 1567 - DNA, 277 bp, Glycine max
  unsure (1)..(277): unsure at all n locations; Clone ID: 700555294H1
tgaatattccagctggaaggagaaggaagtaccatgacgacgtgaccgtaattgtaatcatgctagggatgaatcagaggacttcaaaggcatcaacttgcatttaagatttgccaattcttcaaaaaaaataagaaagttaaaaaaacaaaacaaaactttgtacctatgtagcttttcacaggacgctctcgtgttaagtagtatttcctaggttcaagttgtggtatttaaaatgtatatatggctctacaagaaccatagtctatcnttgtaa

SEQ ID NO: 1568 - DNA, 279 bp, Glycine max
  Clone ID: 700555295H1
cttccatgggctttctcctcattagaatttggtggctcttgagtaaaagcatgacttagtttcccaattaatgtgcttgaattgaatatgtcactgaggatatcatagttgtactcaaaaccatgtttcttgaaattcttgtaatgccttcctttttataaaagataaagtgtacaatgtcaatactaagcaatgacaacatacaacaataacaataacaataattttaggatcaagttataccttaatcaatccgtcccatactttcggggcatcaat

SEQ ID NO: 1569 - DNA, 291 bp, Glycine max
  Clone ID: 700555301H1
cctttctatattgtgctctaacattaggctctatcattcaagccgtcatgataatgcacaggatgagagaaacaacgatgttgatagtttgatgaaagatgaaagctgggttcagtttcttacagagcgagcagctgaagcagttgttaacattcagattgctacccaatgagataaagtagtgaatcctgtagatacaaattctcaaaatgggcatctagatggtgattcacaagattgcattaaatggatggaaacgctactctacttcatcatctcatcatgaagtct

SEQ ID NO: 1570 - DNA, 269 bp, Glycine max
  unsure (1)..(269): unsure at all n locations; Clone ID: 700555303H1
gtagtttggaattgttggatatggaattagtggtagtaaacattgatgtggaangtggctatgctgtttgatttgctttnctntttatatttncccttgttgggtttggtgggggttgggggtttgtttgttgtagatttgtcagtggtacggaacaaggatccagagtggttcttcttctgtccgcagaccggaagtatccgaacgggcacaggttgaaccgagctacgagncaggctattggaaggcaacggaaaggatcggaggat

SEQ ID NO: 1571 - DNA, 282 bp, Glycine max
  Clone ID: 700555304H1
gtgtgttttttgttcttggtcgagccttgtactgtttaacgagaatggacaaggaagtggagcttggttcccttgaaggtgaaatggccacccagcacatttcacaaccacagaagcgcaagggtggtcttgttaccatgcctttcatcattgcaaatgaggcacttgcgagggtggcaagtttgggccttttgcccaacatgatactgtatttgatggggacctacaggcttcaccttgcccaagcaacccagatacttctctggtcccatgctaccagca

SEQ ID NO: 1572 - DNA, 290 bp, Glycine max
  unsure (1)..(290): unsure at all n locations; Clone ID: 700555305H1
cgaaatagtaaaaaagtaagaaagatcccttcagcagctgcaaatgctaatgagagcaaggagcctttgacagatcccactctcctgtgttgtgccttcaaaaagcacaggatatatttattcagtncgaagagagccagaggagcctgaagatgcaactaaaggaagagatgtgttcaatgaaaagccacctggctgatgaacttttgggcagtatncggatattgggaaagttcagttcacaacattcacttcctggacangtgntctacacaccactatgggtgata

SEQ ID NO: 1573 - DNA, 272 bp, Glycine max
  Clone ID: 700555308H1
gtggatcatctcaaagctctctgcttttttgtgacacagatcccttgctgggttccaagttcctccactttggattctctccctaatgggttcctctgatcgattgtttaaccggcaaagaagtcttcatgagatccttggtggtggtcaagttgcagatttaatactgtggaggcggaagaaccttactgtggggatattgttggtcacactagctgtttgggttgtgtttgaaagatctggttatactcttctgtctcttgtttctaagt

SEQ ID NO: 1574 - DNA, 279 bp, Glycine max
  unsure (1)..(279): unsure at all n locations; Clone ID: 700555309H1
ccttcttccgttgttctcttccaattgccttgattttntcggaaaattcttattttccgagaaagttcgtgtttttactgttgaatcgagaattcccaaatcggggtgtctganattcaaagctgttgttgttgttggcggctggggttagtctctgtggaggtttgggtgttttttgaggcagagcttattctcattttgctccaatggagatgcaggtctcaatcgtcttacgtccactcttctggagactttttctcctcttttaataggaaaaaa

SEQ ID NO: 1575 - DNA, 122 bp, Glycine max
  unsure (1)..(122): unsure at all n locations; Clone ID: 700555310H1
tggctttcaaagagatcaattcangaagtttcataggaaaactagattgncctcttcagtngcacttggtagtgtccanagaagggcatcacaagggtcattagggtgttgccctccattca

SEQ ID NO: 1576 - DNA, 278 bp, Glycine max
  unsure (1)..(278): unsure at all n locations; Clone ID: 700555311H1
caaaagagaaggcaatcttatttggcctttgctactggacaatgttaggccagacatgagaatcgcatgggaagagccatttggaccagttttaccagtaattaggatcaattcagttgaagaaggaatccatcattgcaatgctagcaactttggacttcagggatgtgtctcacaaaggatgtcaacaaagcaataatgatgcagtgatgcaatggaaacgggaacagttgcagataantccgccccggctcgtgggccagatcatttcccttcag

SEQ ID NO: 1577 - DNA, 281 bp, Glycine max
  Clone ID: 700555312H1
gtttgaagtagtgcttcgcgtctacattcagttcaatgggcttcttccatctgtgctctctcgccttccgtccaatcacagctcactaaaaccaccctcgttgctccaatccctctctatcaacgaagcaagtgcgaaatgagcaggaggagttttgcgtttaagggaattgtggcctctggcgtttcggtcgcggcttctactctgcacagccgaagcagaaccatcttccaaaggttttgaaagatgccgtcacaagccggaaggtacaatattggaca

SEQ ID NO: 1578 - DNA, 279 bp, Glycine max
  Clone ID: 700555313H1
ggagaagagaaaatgttgaggaaggaggagtggaggggaacggatctgctgggtgggactagataaagtgaagcaagctgacaagactaagggaagattggatggtggaaatggaatcggcagctgaaaaccctaattacccggcggtggactacaagcgaccttccatcttgtcatttcctgcggaggcccgccctcagagttacatccgagttacgatagtgaaagcgctgtctctttccataagattcctgcaattgttggacagcctgccaattc

SEQ ID NO: 1579 - DNA, 290 bp, Glycine max
  unsure (1)..(290): unsure at all n locations; Clone ID: 700555314H1
aaggtgttgagtgttttcttcttgtttggatctgagagagaagagcgagcgatgacggtctttcatttcttcaactggcgccattctccaccttgcggcccccacgccgtctactattnctgccacgcccttatcctgagtatgatacactgcggaacctctatcaaagccgctgttgtttatctggcaacggcattagtgaagctatttgtctagctacttttctgcaaggtttcggagagtgatagcttgnatccgtnatcaggagtttttgaaggcattaataggct

SEQ ID NO: 1580 - DNA, 287 bp, Glycine max
  Clone ID: 700555316H1
gtactctcaatctcattcacctcaaccacttctcatcatctctatcaccccattttctcaaacacctacacaaaatgtgcttcctcaacacaaagtccctggctcacttcatgttgctaacaacaattgtagttggcattgcaatgggagattcatcaaaggacaaagaggaatgcactgagcaattggcaggcctagcaacatgtctgccctatgttgggggtcaagcacaagctccaaccccagattgttgtagtggtctcaagcaagtgctcaagaacaacaaa

SEQ ID NO: 1581 - DNA, 287 bp, Glycine max
  unsure (1)..(287): unsure at all n locations; Clone ID: 700555317H1
gtgactgtttagacccttttaggagtggtgttcttatattcatcggtggttgtaataaaagtcttgaggccctggatgatatgtattacctatatacagggattgcacgggaaagtgaacagagaccagaaaaattatctttaaagaagcaattgaaactgaaatgcctagaacaaaatcccaatcctagccaaaatcaagttnctcgttagatatggagtgggttctgatgtgggacagatcagacagtgttgaattatagccaatcaagtagagtaaatatccca

SEQ ID NO: 1582 - DNA, 285 bp, Glycine max
  Clone ID: 700555318H1
ttgatgttgtgtttgggggatgggatatcagtaacttgaacctggctgatgccatggccagggccaaggtgtttgatatcgacctgcagaaacagttgaggccgtacatggaatccatggttccactccccggaatctatgacccggatttcattgctgccaaccaaggagaccgtgccactaacgtaatcaggggcacaaagaaagaacaagttcaacaaattcattcaaagacttaaggagttcaaagaaagcactaaggttgacaaggtggttgtcctgtgg

SEQ ID NO: 1583 - DNA, 280 bp, Glycine max
  Clone ID: 700555319H1
tgaccctgcccaacatcaaggttcctctcattcttggtatctggggaggcaagggacaaggaaaatcttccaatgtgagcttgtctttgccaagatgggaatcaaccccatcatgatgagtgctggagagttggaaagtggaaatgcaggagagccagcaaaactgatcaggcagagataccgtgaagccgcagacttgatacaagaagggaaagatgtgtgctctctccatgcaactatctgatgcaggagctggtcgtctggtggaaccacccaatac

SEQ ID NO: 1584 - DNA, 280 bp, Glycine max
  unsure (1)..(280): unsure at all n locations; Clone ID: 700555320H1
cagagaccgaggaacagatccttaagcgactacgtaatgctgaggctgagattgagcaagggaaatctctcaagtatttgatttcatcctatacaatgaaaaacttgaggagtgttatgagagacttaagaaactattgggacttgacggtttcatcactgctccacctaaatccggacctatagagattgatttaccaatggaccattgcagtgtccaaaattgataacaaaatcatcataaactggcatctcctcaggagaaaaggaatccaagantt

SEQ ID NO: 1585 - DNA, 277 bp, Glycine max
  Clone ID: 700555321H1
gaggattagagggtcgccacgtttagcaataaccaaaccctctctactcttttttcttctccttctcttcgctagggttttagcttcttcctcttcacttcgttctttttcgcctctacaatgagcaacgacaaggacacattcaacgtcgccgatctcacttctgctctcaacgaggacaatagagcagaccttgtcaatgctcttaagagcaagatacagagtttggctggacaacactcggatatctagagtctctgtcgcccaatgtccgaaa

SEQ ID NO: 1586 - DNA, 281 bp, Glycine max
  unsure (1)..(281): unsure at all n locations; Clone ID: 700555322H1
gggaacagaagagtcattggatggaagtgtgataagtgatatanaaggtggtgaggtaaccattgaaaagttaaaatctgcattgaaatctgaaaggaaagccttaagtactctatatgcagaactagaagaagagagaagtgcatctgctatagcagccaatcaaacaatggcaatgataaataggcttncaagaagagaaagcagcaatggcagatggaagccttgncagtatcaaagatgatggaagaacaatctgagtatgatcaggaggcttgcaa

SEQ ID NO: 1587 - DNA, 270 bp, Glycine max
  unsure (1)..(270): unsure at all n locations; Clone ID: 700555324H1
gaacaaattgcccctgttcaagaatgtcttttcaatcagccagaaacttctaagcatgctggcgaatncacgcaagtttcgccagaattcatgtttgaagaggccacaattaaccaagataggaccagagagctctaagattgagtttgagaatccacttgttgcagaggcaaacttttgtttgcaggtctgggaaaccacatangnagcttctgattccattccccaagggttgatacagaatgacaaaggctggataacatgactagg

SEQ ID NO: 1588 - DNA, 278 bp, Glycine max
  unsure (1)..(278): unsure at all n locations; Clone ID: 700555326H1
gcctaattcgctctcttctaccacaaaccactcaatcctaagaaatccatttgaaatntcaagtctcgttctggctaagtccatgttcattgtttactatacctcaccactccaaggttctcgtaattttcttcagcagaaaacgaaactattgcttccagagaagagcatcatctacgaccattttggcaatattataaaacaagacaaaaatggagagtgacttgagctgggagcggaacacactcnatcatgagctattcagggatggaggtagc

SEQ ID NO: 1589 - DNA, 276 bp, Glycine max
  unsure (1)..(276): unsure at all n locations; Clone ID: 700555327H1
aagaatcatacataaagactcttgtacttaatggaaaaacttatgacctctatgttcacagttacttggcactttggtaaagaagcatctcgtgcggagatgttgaaggtcactggtgattcagctaacccttgcattttagccggttataatgggacctacacatattcgggagttaaatataaggcctggcctccacttctgggtccaatttcgataaatgtcgagaggtagctcttaaagctctgaaatgnaatgaaccagccctcatcagaa

SEQ ID NO: 1590 - DNA, 280 bp, Glycine max
  unsure (1)..(280): unsure at all n locations; Clone ID: 700555328H1
tacggtgtgctctgaaaaagtccatgagatattcagagtttcatacccaccttcctcccctttcttataacaagaacaataattaacaccgctagaaaaatcatcatctctttcaccattaaagcaattaggaaagaggtttttgattgaagctggcgatatgnnnnnnnnnnnnnnnnnnnnnnnnnnnctggtgtggatgatagcgacgccgtttagggtgttggggaaagcgagggacatgtacgtgnagcagcataacgaatgcggtccacaacat

SEQ ID NO: 1591 - DNA, 277 bp, Glycine max
  unsure (1)..(277): unsure at all n locations; Clone ID: 700555329H1
ggcgaatgcttggcttggaacatgaatctaagaggggttacatagggcttgaatactttggccgtacaatattcattaaaatattgcctccagggattcacatgggtcgactgcaatctaccttagatcacccttcctcttccaacaaagtcagaganntccaccaacaatataaggggaaaaagcttatagttggtgttgatgatatggacttattcaaaggtatcggtttaaattctggccaggagcaactccggcagcaatatccagaacagca

SEQ ID NO: 1592 - DNA, 290 bp, Glycine max
  unsure (1)..(290): unsure at all n locations; Clone ID: 700555331H1
catgtngtggctcctccgatccaccaagtccaaaactcctctcttcctcatcttcactttctagaaccttcccctctctctgcacgctccggccccacacttgacctccctcagatcggagccatctctcccctccccgatctcttccaccgcaacaccgctancatgcctttcgcgaaggaaaacgcttccggtggaaacttggccggtcttcccaaagttcctgcgaatacgcttggcagtgnactctanatgcgnatcantctnccgaggtaacaaagcttctggga

SEQ ID NO: 1593 - DNA, 287 bp, Glycine max
  Clone ID: 700555332H1
ctttaagtttatcatccaagttcatgtaccatagcttttataaatatccccatcccattttcccttccaagttccaatattcaattcaacaccttccctcattctcttcaaatgtacggacaaagttgctacgagtccgatttggcccttttggactccattcgccgccacttactcggcgactccgaggaacacagattcggagccccgaatgttaattcgggtagcacttccatgtactctcggagctccagtttcggcagttgtacccttggcctgagtaacga

SEQ ID NO: 1594 - DNA, 287 bp, Glycine max
  Clone ID: 700555333H1
gtgctaggaaagtgagtgagagaaagagatcacatagcagaatgggcttctactcaatgtttcttgcaccaccatgctcttaccacccctgccagatccccatcacaacgcatcatggttagcaccaagcctaaccagcttgtttgcaaggcacagaagcaagaggatattgatgtcagcccaatctctcgccggttagctctaaccgtgctcattggtgctgctgctgttggctccaaagtccaacctgctgatgcagcttatggggaagctgccaatgtgtttgg

SEQ ID NO: 1595 - DNA, 276 bp, Glycine max
  Clone ID: 700555335H1
ctctgctcgtgcctctagggttatcatatctccatttccatttcctctctctcagtttccaagaatcttaagctatgggaaagtcttacccaaccgtgagcgctgattaccagaaggccgttgagaaggcgaagaagaagctcagaggcttcatcgctgagaagagatgcgctcctctaatgctccgtttggcatggcatctgctggaacttacgacgtgagctcgaagaccggtggtcccttcggaaccataaagcacccctccgaatcgtcagg

SEQ ID NO: 1596 - DNA, 267 bp, Glycine max
  Clone ID: 700555336H1
cctcatcctcttgttgtatcacaactgaagtgagatatcaaacattcaataccccaaattctagttctagagaaagcaaagttctttgatttgccttccacccccttaatttccttaattaaccaactgggaaatttggtctaattgtgattcattctctttggggggcttttgtggattaaggttagtatttgcttgattagggaagtctttatgtgacctgggtggaatgatctgtgtctgcatgtgtgaatctggcaagggaac

SEQ ID NO: 1597 - DNA, 274 bp, Glycine max
  unsure (1)..(274): unsure at all n locations; Clone ID: 700555337H1
tggcaccgtactctctaatattccatactacaaaaaacatggatatggggtggagaaatttaactcgaccttgtatgatgaatgggttaacaagggcaatgcaccggcactgcccganactcttaagaattacaacaagctggtgtctcttggcttcaagattatattcttgtgcaggaagaacactggacaaacaggccgtaacagaagcaaacttaaagaaggctggctaccacacatgggaaaantattctcaaggatccacaagatcctc

SEQ ID NO: 1598 - DNA, 277 bp, Glycine max
  unsure (1)..(277): unsure at all n locations; Clone ID: 700555338H1
gtacacaagttcaaggatgaagatgagctttttcacccatccaaaccttccaagaaaaacaacaacattcaacaaaaagcatgggggcaacaccaataacgatgataacagcaaggattccaaggctgctggcgatnagagattcaaaacgctgcccccagcagagtctcttcctaggaatgaaaccattggaggctacatctttgtttgcaacaatgataccatggctgagancctcaagagacantctttggtccgctccacgatanngggattc

SEQ ID NO: 1599 - DNA, 276 bp, Glycine max
  Clone ID: 700555339H1
cggaaattgaatggtacccgggaaaatgtttgactcagaaggttttgaagaaaaagcctaagaagggttcaaagaatgctaaaccaattaccaaaaccgagagctgtgaaagtttcttcaattttttcaaaccaccagaagtccctgaggatgatgttgacattgatgaagatttggtatgacagtctgtcccaataaacctaaggctaaaaatatgaagctttgtctattgctataataacttaattttttcaacaggctgaggaactttcagaa

SEQ ID NO: 1600 - DNA, 276 bp, Glycine max
  Clone ID: 700555340H1
gttgaagtcttgcccttctctcttcaactccaaacacaagacatcatcatccatggctgcctccgtctccactgtccggagctgtcaacagagctcttttgaacctgaatgggtctggacctggggtttcagctcccagttcatccttctttgggagcagcttgaagaaggttattggctcaagggtccccaacacaaagatttcctctggaagcttcaagattgttgctgtagaagagaagaaagagatgaagagacccagcagaccgacaagga

SEQ ID NO: 1601 - DNA, 251 bp, Glycine max
  unsure (1)..(251): unsure at all n locations; Clone ID: 700555341H1
atgcatgcttacctaatttgtgcatgctgttacacgatataanatgagtctgtgagagtgagagtgattcactgttttgtgtatgcaactaacgatttcttttgtgctgagtttgacggtgaatcaganncaggcgtacgtatacgtgtagtagggtgattgagagatggacgctcccctggctgctggtgaacggcgagggggcggcgctggtggcggagaatggtgactacgtggcggtgagggagctg

SEQ ID NO: 1602 - DNA, 274 bp, Glycine max
  unsure (1)..(274): unsure at all n locations; Clone ID: 700555342H1
ctcacttgctcctaagccatacaatacaaaaaagtcgtttttttatntttcattatttcaaccatggntggtgtgnaccccgaggcagganggtggaaggcttatccttctgttatggagactgctcttgatagtggtgatggaaggagtcatcataacatgagtgatgatgggtcggtgatgcatttctctgctacaaggtcagtggcagtgccatncatctggacagaataaagtgatcctagttccaatcatttagcatcctctatagggg

SEQ ID NO: 1603 - DNA, 275 bp, Glycine max
  Clone ID: 700555343H1
gggaagcatctgtcgacgaaaagaagtggcataatgtaaatggtcacgccattgtggatgctcaacatccagttcagggcaaatgtggctgtgagaaaggagctcatactcctgcatctgatcgatcttgcactcatttggaatttgacatttcaggcactggagttacatatgaaactggggaccatgttggtgtttactgtgagaattgtctgaaactgtggaagaggcaataaggttaataggtttgtcaccagatacctatttctcaatcc

SEQ ID NO: 1604 - DNA, 278 bp, Glycine max
  unsure (1)..(278): unsure at all n locations; Clone ID: 700555344H1
cccaccctataaaaaacactctgcaattttgattgattcccctattccacacacaagaagacttcctcaatcatcccatagacatggccaccgtcacttctgcagcagtttctattccctcattcactggcctcaaggcaagcgcaggcaaagtgagtgccgccgcagttaaagtctcagctccccaagccacaaggttctgcggcatncaaggcttccctcaaagacgttggagtcgctgttgtggccactgctgcgagcgcattctagctagcaac

SEQ ID NO: 1605 - DNA, 276 bp, Glycine max
  unsure (1)..(276): unsure at all n locations; Clone ID: 700555345H1
agaagaacttagctacaagctaaggaaggatcaaagagaatggctcaagcaatggcatcaatgactagcttacgtggttcctctcaggctgtgttggaaggtagccttggctccacacgcttgaatgtggggagtggaagcagggtggcctcagtcacacgtgncagggttcacagttagagcacagcaacaatcaagtgaatggtggtgaggtacaaagtagccgtaggcagtgctttcacttgttgctgctggtttgaccactggctctttgtt

SEQ ID NO: 1606 - DNA, 273 bp, Glycine max
  unsure (1)..(273): unsure at all n locations; Clone ID: 700555346H1
gtggattgattacaagatgccaacgtctaaacctcttttccccaaagagaagaaaacataatagatatctcattnctcatcttcatctgcatctgcccatgtttctgtttctgtctgcaattttcaattccaactctctctcacatgcaattctccatccaacaaaagtttctcatcatttctgtttcccatnagcaattaattaaaatactgaatttggtananttcttctcaaatataattagttttacaattatttattcttntcctgga

SEQ ID NO: 1607 - DNA, 280 bp, Glycine max
  Clone ID: 700555347H1
ttgtaaattaagagcatggctgcacaagctcttgtatcatcatcatctcttaccttctcagccgaggctacaagacaaagtcttggaccaagatcactccaatctccatttggcttctcaagaaaagcctcctttcttgttaaggcagctgctactccccctgttcaagcaaggatcagacagacctttgtggtttgcatcaaagcaaagtctttcctacttggatggcagcctccgggtggactaggattggaccctctgggactttcggaccctggaa

SEQ ID NO: 1608 - DNA, 115 bp, Glycine max
  Clone ID: 700555348H1
tctcaactctctccaacaaccacaatggctctcttgggcgccgcctccttccttccgcttcgcatcattccctccgtctgcactctcttcctcttctgcgctccttcttctcact

SEQ ID NO: 1609 - DNA, 281 bp, Glycine max
  unsure (1)..(281): unsure at all n locations; Clone ID: 700555349H1
tgaagttgaagtcttgcccttctctcttcaactccaaacacaagacatcatcatccatggctgcctccgtctccactgtcggagctgtcaacagagctcttttgaacctgaatgggtctggacctggggtttcagctcccagttcatccttctttgggagcagcttgaagaaggttattggctcaagggtccccaacacaaagatttcctctggaagcttncaagatgttgctgtagaagagaagaaagagattgaagagacccagcagaccgacaaggac

SEQ ID NO: 1610 - DNA, 274 bp, Glycine max
  Clone ID: 700555351H1
cactgtctcatcttcttctcataaccctctttctccatggctcttgctggctctgtggttgagcttcaagcctcttcagtaaagaagaaaactgcagtttccagaagttggattctgctggaccactatggcaaaggcactgttcttgatgcggataagtatgctatcatgcgcctggttcaaattcacgccagagatcttcggattctcgaccctctcttatcgtatccttccaccattttgggcagagagaaagtcatgttctcaatttaga

SEQ ID NO: 1611 - DNA, 267 bp, Glycine max
  unsure (1)..(267): unsure at all n locations; Clone ID: 700555352H1
tttttnttttcttccttcctaaagaacagaaatgaaaccgtccgtttccgtattgaacgtagccccccaaaaatgccgtccaagttccgattcctaaaactcttcactcaccgtctctctcctagaaccgccgccgccaatggctcgcaccgcttcctatacggcaaccctctctgcaccatggcggagtccccggagctccctccgtggctcaagttctccgacaccccgacccctccagacgctgactcagacgacaacttcgtt

SEQ ID NO: 1612 - DNA, 270 bp, Glycine max
  unsure (1)..(270): unsure at all n locations; Clone ID: 700555353H1
agcattgaggttcttgagggtgatggcaagtctcctggttctatccgccacataagttatggtgaaggttcaccacttgtgaaatcatcctttgagaagattgaggctgttgatgaggaaaagaaggtagtgtcgtacactatcattgatggggaactccttcagcactacaaaacattcaagggagacatttcagtgactccaattggcgatggatgcgaggtgaagtggagtgctgtgtacgaaaaggttagccatgatattctgnat

SEQ ID NO: 1613 - DNA, 293 bp, Glycine max
  unsure (1)..(293): unsure at all n locations; Clone ID: 700555354H1
gtgagagtgaagcgagaagcgagaagcgacatggatccagacgcgttgggcaaaggcattcgtggagcactactactccaccttgcgacaccaaccgcaacaatctcgccaatctctaccaggaaggttccatgctctctttgcgagggtcagaagatccagggctcccacaacatncgtgcgnccaaacttcacctncccttcccttgccaacagtggccagcactccatgcaccaccgtgcgatttctgcagccctgcaggcgtcaagccggccatggctacgtcttncgt

SEQ ID NO: 1614 - DNA, 276 bp, Glycine max
  unsure (1)..(276): unsure at all n locations; Clone ID: 700555356H1
cgtcttagtcgatcgtcgtgaaggctttccagcacctccgtggttctcgcgcgtggttgactaccgtcaaaggtcattttccaggcctggntcgtccttgtcgttgacagtcattgtgtaagactgtgaatacaagtggtagagctccatttcatcacgctgactgcaagttgttggcttacgattcaagaattggagccactccctgaattaaaaatattgatgagataaggaagttccatgaactgttaccttgaacactttgaaaataatgta

SEQ ID NO: 1615 - DNA, 275 bp, Glycine max
  Clone ID: 700555357H1
cattctctctgtgtatttccctacctctcccttcaagatgcagatcttcgtcaagaccctcaccggcaagaccatcacccttgaggtggaaagctctgacaccatcgacaacgtcaaggccaagatccaggacaaggaaggaatccccccggatcagcaacgtctcattttcgccggaaagcaacttgaggacggccgtacccttgctgactacaacattcagaaggagagtactcttcacctcgtcctccgtctccgtggtggcatgcagatct

SEQ ID NO: 1616 - DNA, 277 bp, Glycine max
  unsure (1)..(277): unsure at all n locations; Clone ID: 700555358H1
ggggagcttgagtcattactaaaagactcatacttgaaaccacaagtattacctanatttttngatataagtaagggcattgaangttccttggagaaagcattaaataagctttgtgaggctgcagatgaagctgtncagaaatggttcccagctgcttattctatcagacncttcagaagcactggaaccaactcatcctggctattcccatactccttgctgttggtactgttccatcagcntctaatccagatggcctgcgaatgntcagctt

SEQ ID NO: 1617 - DNA, 278 bp, Glycine max
  unsure (1)..(278): unsure at all n locations; Clone ID: 700555359H1
tggcattatcagatttcttgtccttgacaaaaaatcagacttctctatcaggtgttgctatcattgttgagaatgcagcctatcttgcagacaagcaaggattaagngtgattgatgctgtcattggtgctttaagcaaagcaggttatgataaaccaggatcccaaaaggtttatattncaatgccactaatagttctgtactgctgaaattgcaaggagaaaaccagttcatgagctagtgtnacaagattgacgagactgttggagaggcagctc

SEQ ID NO: 1618 - DNA, 271 bp, Glycine max
  unsure (1)..(271): unsure at all n locations; Clone ID: 700555360H1
gnagttgtgagcatagctttcttcatcacttcatagtaagcactatagaaaaaacgacattcattcatctatggctaccctattgctcccagcaaccactctccccaagaagacgctgaggctctcagaaaggctttgaaggatgggggactgatgagaaaactgtcatagtaatattgggtcatagaactgtttatcagagggcagcaaatcagaagagtctatgaggaantttccaggaggatctgtgaaacgcctagagtctgagatc

SEQ ID NO: 1619 - DNA, 226 bp, Glycine max
  unsure (1)..(226): unsure at all n locations; Clone ID: 700555361H1
agagttgtcacccattgctgagaggaggtaggagaagagaggagaaaggttacaaccatggcttatccaccactcagatgcatgtcatggctggccatatgtgatgccctncattccttccctgcccactgcaacaaggacactntcacaagaccaagctgctctgcagacttgctgacaatnacctactggctttctgcagctcccttttgcctggatggaggcg

SEQ ID NO: 1620 - DNA, 274 bp, Glycine max
  Clone ID: 700555362H1
ctacgagctagttccgacacagacaaagcaatggcaaagaccgaggttgcttggcataatttatatacagtatttggtttttcttaaaattccttctttgattgttcttttattttttctctctcttttcccatggaggtggagagtgtaatttattgaactaaaaaagtaacttgtgattcaactttatgcctgcagttagaggtgactgttgagagcaagaacaaagacctcaagcacctggggtttgtgaggattgctgctatcaaacatt

SEQ ID NO: 1621 - DNA, 274 bp, Glycine max
  unsure (1)..(274): unsure at all n locations; Clone ID: 700555363H1
ggcttcttctacatcacatccatctttttnntccctcctgaacctgtctgcatccattcccatttcttccttccgtatgcatgttcccaccgtctaaaaaacctagcaaagcaacaaaacggcgtcatgcttgggaagtagcatgcaatggtaaccctaganataggagggacattctgatcggccttggaggactctatggtgctacaacaagtctcacaagtaacaacactggttctgcattggtgctcntgtcgcctccagatccaataac

SEQ ID NO: 1622 - DNA, 277 bp, Glycine max
  unsure (1)..(277): unsure at all n locations; Clone ID: 700555365H1
ccaggattcggttgattaatcaggacaagaacaaatataacaccccgaaatatcgctttgttgttcgtttcagcaacaaagacattgttgcacaaataatatctgctagcattgctggcgatattgttcttgctgcagcatatgcacatgagctgccacgatatggtcttgaagtagggcttacaaattatgctgcagcttattgtactggtctcctgttggcncgaagagtcctcaaaacacttgaaatggatgaggagtacgaggaaatgttgag

SEQ ID NO: 1623 - DNA, 278 bp, Glycine max
  Clone ID: 700555366H1
atccattgcacctttctcttcctccgatggctaatctctcactcttgttcttcggtctcctcctattctccgctgccgtagccaccgtcgaacgaatcgacgatgaagacaaccttctgatccgtcaagtggtgccggacgcggaggaccaccacctgctacaacgcggagcaccacttctccgccttcaagacaaagttcgccaagacctacgccacgcaggaggagcacgaccaccgcttccgtatcttcaagaacaattgctccgcgccaagtcg

SEQ ID NO: 1624 - DNA, 270 bp, Glycine max
  unsure (1)..(270): unsure at all n locations; Clone ID: 700555367H1
gatttgcaagaccatgtcaaatcatcacttgaaggaactttaacgcaaacttttcaggaagagggtttcttcaatgagacactgactagtctttctcatgttcatataataactgatactgaaactgcttcaagaggaggtcagcgagattcaagtttccaaagcttagcagacaaatccataactcgtttttacttgaatttcggcttcatggccacgtacgccaagttggatctccttttaggaagtgnagatacctttattcaagtt

SEQ ID NO: 1625 - DNA, 276 bp, Glycine max
  Clone ID: 700555368H1
aacacaacaacactctctcttctcgctcttggcttttcgctcttcactcactctccattcattcatttccaccgttacatggatccagtaagcgtgtggggtaacacgcccttggcgacggtggatcccgagatccatgacctcatcgagaaggagaagcgccgtcaatgccgcggaatcgagttcatcgcctccgagaacttcacctgccttcgccgtcatcgaggccctcggcagcgctctcacgaacaaatactccgagggcatgccgggcaa

SEQ ID NO: 1626 - DNA, 270 bp, Glycine max
  unsure (1)..(270): unsure at all n locations; Clone ID: 700555369H1
cattttgctgggtctatattgtaagaattatggcatcagaggagacaacaatttggaaggcaatgataaaaactccagcctccatagtgttgataatttacaccttcatatcaatgtggtttgtaggtggtctcactgccttccatttgtatttgataagtaccaatcagactacatatgaaaacttcagataccgatatgatcggncgagccaatccatataataaaggagtgttgaatatttcaaagagatattctggcatcngcatt

SEQ ID NO: 1627 - DNA, 272 bp, Glycine max
  unsure (1)..(272): unsure at all n locations; Clone ID: 700555370H1
agcatttgntcatgccattcatgatggtgttgatgtcatctctgcctctatcggttcgtctaatccctatacngaagctttgttaacagangggatntccataggggcattccatgcagttgccagaaanngtagtcgtagtttgctctgctggaaatgatggaccatcacctttaagtgtcacaaatgttgcaccctggtccatcaccgttgnctgctagnacactagacagggatttctcagcgacatttctctcagcgnacaatcaatc

SEQ ID NO: 1628 - DNA, 272 bp, Glycine max
  Clone ID: 700555371H1
tgcagccatggccacccacgcggctctagcttctacaaggatccccactaacaccaagttcccatccaaggcttcacactctttcccaacccaatgcgcctcaaagagacttgaggtgacagaattctctgggctaagatccacttcatgtgtgacatatgctaacgatgctagagaatcttccttttttgatcttgtagcttcccaacttcactcccaagaccaatggatcatcaactcctgtgaggggagagacagtggccaagttgaag

SEQ ID NO: 1629 - DNA, 272 bp, Glycine max
  unsure (1)..(272): unsure at all n locations; Clone ID: 700555372H1
gccgaaggcttctctacacgctcgccgatnccgcagttgcggcgggaccctgcggttannagcggacactgcggcttccaccaccgatgctgccgtacagaagagcggaggttggttcggcttcatctccgaagctatggagttcgttctcaaggtgttgaaggatggtctttctgccgtgcatgtgcccttatgcatatggatttgctatcatattgctcactgttatagttaaggcagcgacgcttcccctggacaaagcaacaggttga

SEQ ID NO: 1630 - DNA, 178 bp, Glycine max
  unsure (1)..(178): unsure at all n locations; Clone ID: 700555373H1
ttacaacaaaaataaaatgaaaaaaaaaatcaatttacaaagcaaggtagtactgctcatgaaaccttcaataccatataccatattcacaacagttccattataaggtaagaaagcaaatgtgacttttcacactactantaagtaataatncactttccaattgatcattcttctc

SEQ ID NO: 1631 - DNA, 272 bp, Glycine max
  unsure (1)..(272): unsure at all n locations; Clone ID: 700555374H1
cacacacacagcaacacactgcactgtgtggaaagtaagcatggcaagagtggtggcactccaacagaaccaactatctttctctcccttagcttcctctctttttgacttcagtggaaccagacttcaaactcaacttcagttcaagagaaaactatgccatccaaaagggtctttctacgtctcggncatcgagcaccaagaaaatcctaataatgggaggcaccaggtttattggtgtgtttttatctaggctcctgttaaagagggtc

SEQ ID NO: 1632 - DNA, 240 bp, Glycine max
  unsure (1)..(240): unsure at all n locations; Clone ID: 700555375H1
gaattattgttcgttcgncccttttacttagtattccctgtttccggtattcgctcccttttttctgcattctggttttacttagatctctgtcccgcaccagatctggtgcagggtgagagggttgggttcattaattttgtatcaatcttccttctgagcggtaggcgtggggataccagagtcttttcgggaagcaagagagggttctctccgttttcaatagatctctcactgtct

SEQ ID NO: 1633 - DNA, 270 bp, Glycine max
  unsure (1)..(270): unsure at all n locations; Clone ID: 700555376H1
caacaacaacatggctgccactgctgctgcaggcatagcttccttgttttcttcttctattaacagtgtncaaatgtcttcgttcctccaagaactgctccataatagaccctctcataacaacagtgccctcaaaccgtggcatgtttgggtcacacttggtggaacctttgtccattaattcgcacaagttgtggggacctagaatttctgctgctgttgcacaagaagaggctgttgttgttgtggatgatgaggtgctggtttagt

SEQ ID NO: 1634 - DNA, 267 bp, Glycine max
  unsure (1)..(267): unsure at all n locations; Clone ID: 700555377H1
gttctgaccaaagttgttgatttgagtgtttttagcatatttggngtgtctgcaaacaccgcagganttttggcttttnctattgaattagattcctctgggaattcaattctgattcttccttagttttcggttttctgtcttcttttttcctctatttatattttgggttggttttctgttgagtcttgacttgcttgntcnaatccaacccagtttcacacnagttggnngnccccaatncggnaagggaaanangaacgcccc

SEQ ID NO: 1635 - DNA, 263 bp, Glycine max
  unsure (1)..(263): unsure at all n locations; Clone ID: 700555378H1
tttccccattggctagaaagcctccaggagttacaggtactcagtttgcgatcaaataagtttcatggtgtcatcacttgtttcggtgccaaacatccatttctcagnctgagaatttttgatgtctcaaataacaattttagtgggtccttgccagcatcatacatcaagaactttcgaggaatgatgagtgtgaatgacaaccaaactggttcgaaatatatgggtaaccaatattctataatgatcagtagtggttgtaa

SEQ ID NO: 1636 - DNA, 274 bp, Glycine max
  unsure (1)..(274): unsure at all n locations; Clone ID: 700555379H1
gtgtcacaaccagtgagagttcattcttttgattcagcagtaagagttcagganagaataagaaaaatcttgcnctcatctttacatttatcgacacttagatcttttcatgcttctggagatacgggaantatggttagagaccccctctctaaacatattgcggtcttacttcaaatgttgccatgggagactcagaaactaaatctgnattctgagcttccacaccatcattcnttcctctgtgtcaggcatagctgaaggtgctcgatgc

SEQ ID NO: 1637 - DNA, 255 bp, Glycine max
  unsure (1)..(255): unsure at all n locations; Clone ID: 700555381H1
ggccaccacaaganaggcagccgcagcagaagttgcngccacaactgacctctctattgccgagacgccagagattgtgaagactattcaagaagcttgggacaaagttgaagataaatatgcagtgagttcactggcagttgctggtgtggttgcattggtgggctcagctgggatgatctcagcaattgataggctccttaatcctgggctctgagtcgtaggcatggctacatgggtngnttgctacaagac

SEQ ID NO: 1638 - DNA, 271 bp, Glycine max
  Clone ID: 700555382H1
gctggttcaactgaggtgatggctttgaatttgccttctcccgcccaagtgaagcccttatttttctcttcaaataactccacaaaacttccaggtagcttttctttgaagagaaaagatagtgacacaacagtagagagacgagtttattgctctgccgctgctcaatcaccaccaccagcatggccaggaacagctattcccgagccttctgatttcaagacatgggatgggcaaaaacctatttctgtctaggatctacgggttcaat

SEQ ID NO: 1639 - DNA, 267 bp, Glycine max
  Clone ID: 700555383H1
aagcagaggaaacaaccatgtctaatgcttggtatgaagtgttgtcggttttgcacttgatggcaatgctattgctgtcacagtctgatttattacttcttcctagaacatccactgatggtcatcagccaaaagtatcagaagaaagcagacgggcttctgttgatatcttcttaaaggcagctgggtatcttgactgtgctgtaaggcatgttctccacagttgcctggcgaactcaggagaatttaccagtagatctgcagaag

SEQ ID NO: 1640 - DNA, 265 bp, Glycine max
  unsure (1)..(265): unsure at all n locations; Clone ID: 700555384H1
acggtgtgctctgaaaaagtccatgagatattcagagtttcatacccaccttcctcccctttcttataacaagaacaataattaacaccgctagaaaaatcatcatctctttcaccattaaagcaattaggaaagaggtttttgattgaagctggcgatatgnnnnnnnnnnnnnnnnnnnnnnnnnnnctggtgtggatgatagcgacgccgtttaggtgttggggaaagcgagggactgtacgtgagcagctaacgagtgcgg

SEQ ID NO: 1641 - DNA, 267 bp, Glycine max
  Clone ID: 700555385H1
caaacatggcgagagggttaaagaaacacctgaagaggctcaatgctccaaaacattggatgcttgacaagcttggtggtgcctttgcacccaagccatcatctggaccccacaagtcccgggagtgtcttcctctgatcctcatcctacgaaacaggctaaagtatgctctaacatatagagaagttattgccatcttgatgcagcgccatgttcttgttgatggcaaggttaggacagacaagacataccctgctggtttcagga

SEQ ID NO: 1642 - DNA, 271 bp, Glycine max
  unsure (1)..(271): unsure at all n locations; Clone ID: 700555386H1
cnatatttttggaanaaggttttcttgnttanntgaacaaggagcttcaatcatntcgntatgatanaantgaatatgaaggcttgccatttgattttcacggtggatatattggttacattgggtataacctcaaagttgagtgtggtgtgaaatcgaaccgtcanaaatctacaaactcctgatggcatgcnttttctttgctgataatctgnagctcttggaccacaaaaatgatgatgtttatatatngggncatacatgnagnaag

SEQ ID NO: 1643 - DNA, 257 bp, Glycine max
  unsure (1)..(257): unsure at all n locations; Clone ID: 700555387H1
cggtactattgcaaggtctgggaccaaggaattcatggaagccctggctgctnntgctgatgtgagcatgattggacagtttggtgttggtttctactcggcttatcttgtagctgacaaggttattgttaccacaaagcacaatgatgatgatcagtatgtctgggagtcccatgctggtggctcatttactgtgacaagggatacatctggtgagaacctggtaggggaacaaagataactttgtttctcaagga

SEQ ID NO: 1644 - DNA, 267 bp, Glycine max
  unsure (1)..(267): unsure at all n locations; Clone ID: 700555388H1
agaaaagaaggaggatcccaacgcgctttccaacttcaggatttcggaacccttgaggcaaaaattgaaggagaagggtatcgaatcactgtttcccattcaggccatgaccttcgacaccgttctcgatggttctgatttggtcggtcgggctcgcaccggtcagggtaaaactctggcatttgtgntgcccatattagagtctttaataaatggtccaacaaaagcttcaagaaagactggctcgggaggatccaagtgntcttg

SEQ ID NO: 1645 - DNA, 133 bp, Glycine max
  unsure (1)..(133): unsure at all n locations; Clone ID: 700555391H1
tgaatatntccagctgcgaaggagcaggaagtaccatgncgatgtgaaccgtaatngtaatcntggcnnnggatnantccgaggacttcanagggcatcaacttgcatttaagatttgcncaatancttcaaa

SEQ ID NO: 1646 - DNA, 273 bp, Glycine max
  unsure (1)..(273): unsure at all n locations; Clone ID: 700555392H1
tgcnatattccanctggaaggngaaggangtaccatgacgacgtgaccgtnattgtacttcatgctanggatgactncagaggacttcaaaggcatcancttgcatttaagatttgccagttcttacaaaannaataaganagttgnacanancaaancaaaactttgtacctatgtagcttttccacaggacgctctcgtgttaagnagnattncctaggttcaagttgtggnatttggtaagtatataggncgtctnacagaaccantagt

SEQ ID NO: 1647 - DNA, 270 bp, Glycine max
  Clone ID: 700555393H1
tgaatattccagctggaaggagaaggaagtaccatgacgacgtgaccgtaattgtaatcatgctagggatgaatcagaggacttcaaaggcatcaacttgcatttaagatttgccaattcttcaaaaaaaataagaaagttaaaaaaacaaaacaaaactttgtacctatgtagcttttcacaggacgctctcgtgttaagtagtatttcctaggttcaagttgtggtatttaaaatgtatatatggcatctacaagaaccataggttct

SEQ ID NO: 1648 - DNA, 267 bp, Glycine max
  Clone ID: 700555394H1
gtcacactaaataaaagaaggaatagaagttctgcataacactattgatgcagcattctgtaaaacatttactcttatgaatattgaaacgtgtattcaggtaattcggcaaggaagtgatataacacttgttggatggggagctcaattatctataatggaacaagcttgtcttgatgctgaaaaagaaggaatttctgtgaattgatgatctgaagacactattcctgggataaggaaacagtagaggcctcagttaacaagaca

SEQ ID NO: 1649 - DNA, 280 bp, Glycine max
  unsure (1)..(280): unsure at all n locations; Clone ID: 700555396H1
tcaaattagttcattctctttgcgcagttccctacctctcctttcaagatgcagatcttcgtcaagaccctcaccggaaagaccatcacccttgaggtggaaagctctgacaccatcgacaacgtcaaggccaagatccaggacaaggaaggaattccccnggancagcaacgtctcatcttcgccggaaagcancttcgaggacggccgtaccctacgccggactacaacatnccagaaggagttcaacccttncaccttgtcttcgtctccgtggtgg

SEQ ID NO: 1650 - DNA, 308 bp, Glycine max
  unsure (1)..(308): unsure at all n locations; Clone ID: 700555402H1
cagagtgttggggttgaacacctgaacagaacttgaaccctgcctctgcgctcttgtggaatctgtgcagtgcttgaaccctaataatggctgctttcttgagaaggtttgcgagggccactccgatcctattcgctgcccaatccaattcctctcacaccaatctcngccttcccttcactgccatcgccgccatttccggcggagtctccttcctntactaccattcctctcccaacttcgctcattcacaanaagcagnacaagtggaaagtaaaaccatgcantcgtnccggataattgggccg

SEQ ID NO: 1651 - DNA, 165 bp, Glycine max
  unsure (1)..(165): unsure at all n locations; Clone ID: 700555403H1
gtttcaacaccttaatttgcacacgctgcttcttcagcttgagaaatggcacaaganacctttctattcacatctgaatctgtaaacgagggtcaccccgacaagctgtgcgaccagatctctgatgcagtgctcgatgcgtgccttgaacaggaccctgacagc

SEQ ID NO: 1652 - DNA, 297 bp, Glycine max
  unsure (1)..(297): unsure at all n locations; Clone ID: 700555404H1
tgctatctgcttcctcgtagtacttcattgagagagacatggacactgtactaagtactacgctgctactcatgttggcatgctccatcgtgcatgttcttcgttcactacaagcaagaatgagaagaaaatcaaactacaatcttccaccaggaccctctctncctcaccatcattagaaactctaaacaactctataaaaagccacagcagacaatggccaagcttgccaaaacctatggccccataatgcgtttcaccataggccaatcaaccaccatagtaatctcntcatag

SEQ ID NO: 1653 - DNA, 306 bp, Glycine max
  unsure (1)..(306): unsure at all n locations; Clone ID: 700555405H1
gccagatgcaaattttgaagagagagaagctaagattctagagagagaagttgcattgctttgcttcccgcgtttgtgcattaattttcttatgcgtgcaagtncattcacacaccacaaagctcccacatttgttgataaatagaagctctaattgtcttcaagatcttgcattccccacctttagcctcactcaagttctttccctttttttagaaagagattcaaagggtgaaaccatcatcggttgttagatcaagctatttattctcttaatcactgtctgggacctcttatcttcttcaa

SEQ ID NO: 1654 - DNA, 117 bp, Glycine max
  unsure (1)..(117): unsure at all n locations; Clone ID: 700555407H1
gcttattgcaataacctaacctggtgtcgtgatccgggcacnggaactagggtttgcgctttctgtgttcaacaatcaagtttcaagaggagaggagaagagatggatgactgttgt

SEQ ID NO: 1655 - DNA, 306 bp, Glycine max
  unsure (1)..(306): unsure at all n locations; Clone ID: 700555408H1
ctctagagaatcaagaaaattattatacccattaagatgaaaccgtacctacgtgcaatattcctattattccttatccttccttcggcgagatggggcgaggctaaaattgataggaagncgataacaatgttttggggcaaggttaaagatgcgacgataaaaaatttcccgagtcgtgatgagcggaagaaactgagggagtattacgagaaattcagggaattcatggatcgtgtagaacaaaagacgancccctcccccaccgccaatgtaccgtttacnaccaaagtcccctcccccacc

SEQ ID NO: 1656 - DNA, 303 bp, Glycine max
  unsure (1)..(303): unsure at all n locations; Clone ID: 700555409H1
gnttaatcctgatgcttcttatcttgttcttataaaaggctttctcaatatcaagataagaagcatcaggattaacctttcttcccattatcttggcaagggtgagcttggggtcctctccgagtaaccgaccgaacttganctccatgaggtcgtagctgtcgaatttaggtggttctttttctccttcatttcgtgatcgtgaggcaaagacctgactctctgattcagagaaagggttcttgttctgtccgatgaaaaccagtgaagctgggtgaagaagggtttactactggtgagagg

SEQ ID NO: 1657 - DNA, 305 bp, Glycine max
  unsure (1)..(305): unsure at all n locations; Clone ID: 700555410H1
ctaacctcgcagttccttgatctctcctctcaagatgcagatattcgtgaaaactttgaccggcaagaccatcacccttgaggtggaatcctccgacaccattgacaacgtaaaagntaagattcaagacaaggaagggatcccacctgaccagcagagacttatctttgcgggtaaacaacttgaggatggtcgcacccttgccgattacaacatccaaaaggaatcaaccctccatctcgtgcttcgnctcaggggtggcatgcaaaatctttgtcaagactttgaccgggaagaccatcacc

SEQ ID NO: 1658 - DNA, 301 bp, Glycine max
  unsure (1)..(301): unsure at all n locations; Clone ID: 700555411H1
agtgganaccctatattaattattgctgaggatattgaacaagaagctttagcaactcttgtggtgaacaaacttagaggatcactgaaaattgcagcactcaaggcccctgggtttggagatcgcaagagccagtaccttgatgatattgccatcttgactggcaggtactgtaatcagagaagaggttggccttactttggacaaagctgggaaagaggttctcggatatgcctccaaggtggttctcancaggatacaaccacaattgttggtgatggaagtacccaggaagcagtga

SEQ ID NO: 1659 - DNA, 299 bp, Glycine max
  unsure (1)..(299): unsure at all n locations; Clone ID: 700555412H1
agtggataccctatattaattattgctgaggatattgaacaagaagctttagcaactcttgtggtgaacaaacttagaggatcactgaaaattgcagcactcaaggcccctgggtttggagatcgcaagagccagtaccttgatgatattgccatcttgactggaggtactgtaatcagagaagaggttggccttactttggacaaagctgggaaagaggttctcggatatgcctccaaggtggttctcancaaggatacaaccacaattgttggtgatggaagtacccaggaagcagt

SEQ ID NO: 1660 - DNA, 300 bp, Glycine max
  Clone ID: 700555414H1
atcaaattgagttaccaactgcggaggagtttcaaccattgaactttgatatatattatgacccaagaagcgagctactggatggcaaattattctcccctgtacttgcacatattcaaccagaatttcattatcaagcaaacatcgaatcagatggtcgatatgggcttcaatatggtacaaatgagacaaacatgtcagactttttgaattcagttgttaactgggatcaagtaccctttgaggatcccaattgtcaacagcagagctaccccttgtttaatgttaaggataacatat

SEQ ID NO: 1661 - DNA, 299 bp, Glycine max
  Clone ID: 700555416H1
atcagttcgtgcccgatcagaagctcccatgatcagtgatggatgccaatggagaaaatatggacaaaaaatggccaaggggaatccatgccctcgagcatactacagatgcactatggcagttggttgcccagttcgcaaacaagttcaacgttgtgctgatgatagaaccattttggttacaacatatgaaggcacgcataaccatccactgccacctgctgctatggccatggcatcaaccactacagctgctgctagcatgttgctttctggatcatgtccagtgcagatggata

SEQ ID NO: 1662 - DNA, 164 bp, Glycine max
  unsure (1)..(164): unsure at all n locations; Clone ID: 700555419H1
aaaaacgtgtggttatgtgattgtggaagagagaactgagacggcattgccaattctcccttgatctatgaaactgaccctgcaaatctgaggccacaatcggtagagattgtttcattttcataacaganaaaaaaagaacatttcagctctaagcctctaac

SEQ ID NO: 1663 - DNA, 299 bp, Glycine max
  unsure (1)..(299): unsure at all n locations; Clone ID: 700555420H1
agaccaccggagatatgtacggacggagtgattcttacgaatccgatttggcgcttctggattcgattcgccgccacttgctgggagagtccgaattgatattcggagccccgaatttcggttcgggtcggagctccagtttcagcagcttggactcgtgtttgagtgatgattggggagagcttccgtttaaggaggacgattcagaagatatggtgttgtacggcgttctccgtgacgcaanaatgtggggtgggtccatccctcgatgccggctcgcccgagagcgtctcgtcggg

SEQ ID NO: 1664 - DNA, 131 bp, Glycine max
  unsure (1)..(131): unsure at all n locations; Clone ID: 700555421H1
anttgttgttgtgtggtggggcacgatggcggaggctcctccgtctctaatatctctgtgcancgacgctctcgcacaacaatttcnncgtccaagcgatgatcntccttctatctacgaccnnccttctc

SEQ ID NO: 1665 - DNA, 113 bp, Glycine max
  unsure (1)..(113): unsure at all n locations; Clone ID: 700555422H1
attttnttcgtttttnttttatggaaaaaaatattgtagcaatttcgtcgtagaaacaaaattcccctattttcggcacgccgttgttgaatttccaatctgtgatttnntnt

SEQ ID NO: 1666 - DNA, 303 bp, Glycine max
  unsure (1)..(303): unsure at all n locations; Clone ID: 700555423H1
acacagtcggttnttccttctcaaatattcttgagatcnccattntntccgaagcaaagccatggctaagggncctggtctctantctganatcggcaagaaagctaggganctgctgttcaaggactaccacagtgaccagaagttcaccatcaccanctactcaccgactggagtggctattacagcatcaggaacnaggaaaagtgaactgtttctgggctgatgtaagngaccagttgaagaacaagaacatcactactgatatcaaagttgatacagattctaatctcttcacaatat

SEQ ID NO: 1667 - DNA, 302 bp, Glycine max
  unsure (1)..(302): unsure at all n locations; Clone ID: 700555424H1
agccttctttgcttatgaaaaacctgaatttgtcattgtagctgcagccaaagttggtggcatccatgccaacaacacctaccctgctgatttcattgccatcaacctccaaatccagaccaatgtcatcgattctgcatatcgcaatggtgctaagaaactgttgtttttgggttcctctngcatttaccccaaatttgcaccccaaccgattccggaagatgctttgcttactggaccttagagcccacaaatgaatggtatggccattgccaagattgctgggatcaaaatgtgccagg

SEQ ID NO: 1668 - DNA, 301 bp, Glycine max
  Clone ID: 700555425H1
ccatgcatcagccatgagcagtgatggtggatgcatggacaaaaccatactccagggaatatgcagccttcccagctccttggctccgtactgcaaagttctggcctaccacaggacgtgttgataatgtgtacggtgaccgcaacctcatttgcacccttctcccagcatcacaggctgttgaagaacaagcagctgccacagcataatgtgttcaaatgacaactattttcatttcccgttgtacataaactcttattcctattcatacagttcttgcacttgttgaatattgctcatc

SEQ ID NO: 1669 - DNA, 297 bp, Glycine max
  Clone ID: 700555427H1
caaggcagaaagcaagctcatcctagagttttaaaaatggcagcagcctcctccatggctctctcttccccatccttggctggcaaggccgtgaagctgggcccatcagcccccgaagtcgggagggtcagcatgaggaagaccgtcaccaagcaggcctcctccggaagcccatggtacggcccagaccgcgtcaagtacttgggcccattctctggcgagcccccgtcctactcactggcgagttcccaggtgactacggctgggacactgctgggctttcggccgacccagaaa

SEQ ID NO: 1670 - DNA, 296 bp, Glycine max
  Clone ID: 700555428H1
gctgatcgagaaaaggtaaaatcttgtttgactgagttggcagatagtagcaatgctttcaagcaagctttgaatgctggcatagaacaacttgtggcaaccattacacctcgcattagaccgttattagacagtgtaggaacaatcagctatgagctttcagaggctgagtatgcagataatgaggtgaatgacccatgggttcagagacttctctatgccgttgagtcaaatgtggcatggctgcagccactaatgactgctaacattatgacacgtttgttcatttgattatt

SEQ ID NO: 1671 - DNA, 299 bp, Glycine max
  Clone ID: 700555429H1
gttacactaccaccactttgattccaaataaccaccatcaccatgttcacggctagtaaactagccttcacattaacaccacctcgtccatgcactgcacccttgacaccaatctcttcagcttctggtgttcacctcattcagttcaatggcaggcacttatgcctccgccaaaggctgtttctactttctcctatggccactgcagatcaacaagggaaagttgaagaatttgaagatgattcaaatactgttgatagtaaaattctcccatattgtagcatagacaaaaaagagag

SEQ ID NO: 1672 - DNA, 128 bp, Glycine max
  unsure (1)..(128): unsure at all n locations; Clone ID: 700555431H1
aacanatttctaagctcttctttctcactctcancaccttnacccatggccaaagaccgagagaagaaactctacgtagccgtgctcggnaactangccgccgaantcaaactcctcctcnncacgct

SEQ ID NO: 1673 - DNA, 298 bp, Glycine max
  Clone ID: 700555432H1
ggaacatatttaccccatggaaaatgaattttataaacttgctcaatcagactcacgttggactgttcacccagtagaggaaaagttaaaggaaatggcaaagaaagaaggcttgtggaacttatggattcctcttgatagtgctgtgagagcaagaaatcttctctttgatgggagcaataattatcactctagtgatgcaaatgacttgctattaggggctggtctcacaaatctcgaatatggatacctttgtgagatcagggtcgttctctttgggctccacaagtgtttaact

SEQ ID NO: 1674 - DNA, 151 bp, Glycine max
  unsure (1)..(151): unsure at all n locations; Clone ID: 700555433H1
gaggagatagaccccagaagtggtttctgcagctccaattcaatcttctacagcaagcgtaagnncctcccactccctcccaacaangccttngangtcaccaccttcatctcctcccgcgccgaccgcgccaccacagccttcgtngagg

SEQ ID NO: 1675 - DNA, 303 bp, Glycine max
  unsure (1)..(303): unsure at all n locations; Clone ID: 700555434H1
ctcgtgaacatgctctgctttcattcacccttggtgtgaaacagatgatttgctgctgtaacaaaatggatgctactacacccaantattccaaggccaggtatgatgaaattgtgaaggaagtctcttcctacttgaagaaagtaggatacaaccctgacaagattccttttgttcctatctctggttttgagggagacaacatgattgagaggtccacaaaccttgactggtacaagggtccactctgcttgatgcacttgaccagattagtgagcccaagaggccctctgacaagcccct

SEQ ID NO: 1676 - DNA, 299 bp, Glycine max
  Clone ID: 700555435H1
gcagccctagcagcacaaggaatctccgagcttatgcctcctgatgttgctaatgcattttggagttctgacaaagtctcttctaaggtctccaaaagcatgcgtgatattgtcagagttgctatgagtcaagcacagaaaagaacaagattatctggggatacaaattttagccggattatctgttcaagaggggattctgatccttttgatggactctatgttggtgcatttggtccttatggcatggaaatagtgcatttgaggcgaaaatttggacattggaatgaagtgaccat

SEQ ID NO: 1677 - DNA, 298 bp, Glycine max
  unsure (1)..(298): unsure at all n locations; Clone ID: 700555436H1
ggcaatggattagtaaaaccaaagcaccctgatttcaaacgcaaggatcgcaattctctctggcttggcaaggatgaaaagtggggttttgcctaaattggaaggacttcaatttgatgttccaactgctatatccaaaaaaggtgatggtggtgagccctgtaatgatttggtgcaaaactatgctaactggtgggataatagattanataagaggaatgcaaaagctcccgatttcaagcacaaagaaaccggtaaagggttgtggcttgattcttcatcagagtgggttttggaa

SEQ ID NO: 1678 - DNA, 77 bp, Glycine max
  unsure (1)..(77): unsure at all n locations; Clone ID: 700555437H1
cntntactcanacagagccgttanccaaatgcnacaatggcnacgganccgttaactctncatctctgntgccttgg

SEQ ID NO: 1679 - DNA, 301 bp, Glycine max
  unsure (1)..(301): unsure at all n locations; Clone ID: 700555438H1
aaggttcttgcagtttcaagtgatgtttcttcaccctttttacgcacttatgcccattgtgcaaaggacagagcaggtgtaacgttacttctgatcaacctaagcaatcagactgatttcatactcactgttcgaaacccggcgactgcaagtgttgtagaaaatgaagtggccacaggcacccataaggaaagttcattctttgataaactcaagaagacattttcttgggttggaacaaaagggtcagaggtcacattcagagaagagtaccacttgactccanaagatggttacctcc

SEQ ID NO: 1680 - DNA, 299 bp, Glycine max
  Clone ID: 700555439H1
gatcgagataactagaaacagtgtgatgaaaatgaaggtccttgttttcttcgttgctacaattttggtagcatggcaatgccatgcgtacgatatgttccctctccgaatgaacactggctatggtgcccgtactccggaggtgaaatgcgcaagttggaggcttgctgtggaagcacacaacatctttggctttgagaccattcctgaagagtgcgttgaagcaacaaaggaatacatccatggcgaacaatatagatcagactccaaaacagttaaccaacaagcttacttttatg

SEQ ID NO: 1681 - DNA, 298 bp, Glycine max
  unsure (1)..(298): unsure at all n locations; Clone ID: 700555440H1
cttcctggataacgttttcgggttcgagaaggcacttgtgttgtntttcgtacgaaatggagactaaacagagttcggtgacggttacgctcagttacggcgcgttgacgtgcgccgcggaatttctcgcgactttgctagcttctgctgtcgtcaaagcctcgcttttggccccggatctctaccggctgctattgatcaacacgcctactgccaaaggagagagcaaaattcagagtgaagacaagcaacgtgatgcagagggagaagatggtaacgatgatgaaggcgacgatga

SEQ ID NO: 1682 - DNA, 300 bp, Glycine max
  Clone ID: 700555441H1
cacagaccccatctgtttcccgtaaccactccatagccagtacaccttatgttcagccatctcttaggtcctcctaccatcaatccccctccctaagcatcagccgaagctccgtagatcttaggaatgcatcccaaagatctctagcttctcacttgaattcaccatgttccatgggatacccatctttgtcatctcttaactcaaggtacatgtctccacacattccaagtccaagcaatgcttcagtaagctatatgggttcatccagtcatcaacaacatcctctccgttatagtg

SEQ ID NO: 1683 - DNA, 299 bp, Glycine max
  unsure (1)..(299): unsure at all n locations; Clone ID: 700555442H1
caaccacgcgcgtttcgcacctcacgaactcggagaagcaaacgcagcgtcgtcgattcgtcactcgcaacttcgggcacgcgcggcgatggcgtcggtccacagcaccgtcgctccccgtaccttcctgccgtcaattcccaagccgagagctcctcttcacgccgcaaagttcgtcgccggcggcgcgcacaactttcggagactgtcgcgcaacctcattctctccggaaacaaacgcgcggtggnggcgaactcggctgcggaggagttcgacgtgatatcggtgcagagcgacg

SEQ ID NO: 1684 - DNA, 293 bp, Glycine max
  Clone ID: 700555443H1
ctctctgcagcaacaagatgtggaaccaaccattgggaaaaaccgatttggaaagcggttctcgcccgctgtatccgatgatgcttgagagccccgaactgcgctggtctttcatcagaaaagtatactccataatcgccatacagttgctcgtaaccatcgtcgtcggcgccgtcgtcgtcaccgtccgcccaatcagcgtcttcttcgccaccaccggcgccggattggctctctacatcgtcctcatctttgtccccttcatcacattgtgtccatttatatactcccag

SEQ ID NO: 1685 - DNA, 258 bp, Glycine max
  Clone ID: 700555444H1
ccgatcgcatagctcgctcgcaaccaccatgccttcccgaagaagaactctcttgaaggtcatcattctcggtgacagtggggtggggaagacatctttgatgaaccaatatgtgaataagaagtttagtaatcagtacaaggcaaccattggagcggattttttaaccaaagaagtgcaattcgaagataggcttttcaccttacagatttgggatacagctggccagaaagattccaaagccttggagttgctttc

SEQ ID NO: 1686 - DNA, 295 bp, Glycine max
  Clone ID: 700555445H1
gggctaccctaacctcgtcttcctctctactaatttcagctatggccgacgaagctgtggttgttccagatcccacccagatcgatgtcaagctctttaaccgctggagcttcgaggatattgaggttactgacatttcactggctgattacattggagttgcggcatccaagcacgccacatatgttcctcacaccgccggaaggtactccgtgaagcggttcaggaaggcgcagtgccccattgttgagaggctcaccaactctctcatgatgcacggtagaaacaatggcaa

SEQ ID NO: 1687 - DNA, 266 bp, Glycine max
  unsure (1)..(266): unsure at all n locations; Clone ID: 700555446H1
ttagtgatgttgatgnttttgatggcatggacagatgtcnntnaaaagagttttgaagatggagatcangaaatacggttgcaggatttgaaaaaaatttcaacaacagangcagatgacaaccagtctgttaatctggttgaagtcaatggacattgttctaatcaagttgattttcttcgatttgaggtgagcccatacactggaaggatccacttgtatacttgcattttgggtactgataaaagaccacagccacttcatga

SEQ ID NO: 1688 - DNA, 231 bp, Glycine max
  unsure (1)..(231): unsure at all n locations; Clone ID: 700555447H1
atgaacaatctgacggtctggttgtgaggaatatattaacaatgcctgcccctaagaagttggtcccgccatcatccaatggaatgccacctcctctactgagaaccatgcccccancacctccgcctaaattttctgatccatttgaagttaaagtacacaacaagaacaagactttgcttaagacaaaatctgatgcagttcctgatacattggtcaacctaatggaat

SEQ ID NO: 1689 - DNA, 296 bp, Glycine max
  Clone ID: 700555448H1
aaggcctaggcctaacaaaatcagtttaaatgaagccaatgaagctggaaggaaaagcaatcctcctagaagtgtggaagagagaaaggtggaatatgatcgggcacgagcacgcatttttagtagctccagaagttgtgattcagatgatactctgtcccagacttcaactgatgagaaaaattctcttataaacaaggatgagaatgaaactagcaagacccctgtggtttattcagaacaatgctctattggtagggatattaattctactcgagttgccatcttgagagata

SEQ ID NO: 1690 - DNA, 173 bp, Glycine max
  unsure (1)..(173): unsure at all n locations; Clone ID: 700555449H1
anaattttgctcctttcgcccctaaactttaacagaggtcgttgttcaccgcnattcctcaccccaatggaagncatcaagtgaattgcaatcagaaganaatnaagtctccaatgaganaaataagaaaagaaagctgnaaacaccggcgcagttaaagccttggaggattt

SEQ ID NO: 1691 - DNA, 101 bp, Glycine max
  unsure (1)..(101): unsure at all n locations; Clone ID: 700555450H1
gtctttatctttttcagtctattctttccctctccgcaataaagattcactggtgntacgcgttaacatccactctattaagcaaatgtnctcctagtagt

SEQ ID NO: 1692 - DNA, 297 bp, Glycine max
  unsure (1)..(297): unsure at all n locations; Clone ID: 700555452H1
gctcccaagtgtgctcaccacaacaatcatcatgaaggtttcatgaatttcattcacagggatgaggaggttaattacttcccttcaaggtatgancctgttcgtcatgcagaaacgttccccatacctcctgctatctgcagtggaaggcgtgaaaagtgtggaattgagaaggagaacaactttaagcagcccggagagagataccgatcttgggcacctgacaggcaagatagatttaatcgccgatgggttgatgctttatctgacccacgggtcacccatgaaatccgcagt

SEQ ID NO: 1693 - DNA, 297 bp, Glycine max
  unsure (1)..(297): unsure at all n locations; Clone ID: 700555453H1
ccaagacacactcgttcatatatctctctgctcttctcttctcttctacctctcaagtttttgaagtataaagatggcagagacattcctattcacctcggagtcagtgaacgagggacaccctgataagctctgcgaccaaatctccgatgctgtcctcgactntgnatcgaacaggacccagacagcaaggttgcctgcgaaacatgcaccaagaccaacttggtcatggtcttcggagagatcaccaccaaggccaacgttgactacgagaagatcgtgcgtgacacctgcagg

SEQ ID NO: 1694 - DNA, 295 bp, Glycine max
  unsure (1)..(295): unsure at all n locations; Clone ID: 700555454H1
ctgtggtgagaggagctatgaagagcttggagtaggtggtgcagttgtgtaccaatcatttgttcaaggctgtgatggcagtacatctcccaggtctattctgaaatgctgctggagtgagnatgagaacgaagatgaagtgagggagatataagtacttctggtttttatgttctgttatttatcttactgttgagtgtgttattacctaatanataaatttgggggttatgatgtgagagtgaagcatgaactnattgtgtagcttcacttaatttgtgtgattatgccagag

SEQ ID NO: 1695 - DNA, 276 bp, Glycine max
  Clone ID: 700555456H1
gtccgaaacccctcacaccgtccacgccctcgacgtctacacgcgacaagatcaaacacctacctggatcccgccgattcccccctcccttgggctggccgcatcaccttccaccgcctcaacatcaaacacgactctcgcctcgaaggcctcatcaagatggcagatctcactattaatctggctgcgattgcatcccgcggattacaacactcgccctctcgacaccatttacagcaatttcatcgacgcgctccccgtggtgaaatatgttcc

SEQ ID NO: 1696 - DNA, 296 bp, Glycine max
  unsure (1)..(296): unsure at all n locations; Clone ID: 700555457H1
gcaattgaagttaaaagccttagccttccctacaactccaaacanaaagacatcatcatccatggctgcctccgtctccactgtcggagctgtcaacagagctcttttgaacctgaatggttctggagctggagcttcagctcccagttcagccttctttgggaccagcttgaagaaggttattgcctcaagggtccccaacagcaaggtttccggtggaagcttcaagattgttgctgtagaagagaagaaagagattgaagagacccagcagaccgacaaggacagatggaagg

SEQ ID NO: 1697 - DNA, 292 bp, Glycine max
  unsure (1)..(292): unsure at all n locations; Clone ID: 700555460H1
cttgcagaattcaaaganggcgtcttcataaacgcctttattctccgtttccgtttccttcccggaattcgatttttcatctctgaaaatgagagagtgcatctcgatccacattggtcaggccggtatccaggtcggaaatgcttgctgggagctctactgtcttgagcacggcatcgggcccgatgggcaaatgccaagtgacaaaacagttggcggaggtgatgatgctttcaacactttcttcagtgagactggtgctggaaagcacgtgccacgtgccgtctttgtt

SEQ ID NO: 1698 - DNA, 290 bp, Glycine max
  unsure (1)..(290): unsure at all n locations; Clone ID: 700555461H1
ggccatagaactcaaatgccctatctgttggagtttgctcgattctgctgtgtcgcttacctgcaatcatcttttctgcaactcgtgcattttcaagtccatgaaatcagcctctgcttgtcctgtctgtaaaattcctttcantcgtcgagaggttngccntgctccgcanatggacaacttggtcagnntatatntagacatggaagttcttcaggagttagtacatttgtaacccagaatgcccctgtnactagcttatcanatggagaaaaggnatgtgagggtgg

SEQ ID NO: 1699 - DNA, 294 bp, Glycine max
  Clone ID: 700555462H1
ggaaaattcctttgtgaagaccagtctcaagactctacaagtcacagacaacagttccaagagaaagagctattggacaactagtaatgaagttgttaagactgaatctgatgcaaagacaaaactagggttcagtccagctgagatagtaattgtgaaccctaataagaagacttccactggaaatgaagtagggtaccgtttggtttcaaatgcagcggttcatcctcttctcacagatgatgattaccctcaaacacgtggtgctttcaccagttacaatgtttgggttac

SEQ ID NO: 1700 - DNA, 97 bp, Glycine max
  unsure (1)..(97): unsure at all n locations; Clone ID: 700555463H1
attctaattccaatcccaatcccaattcacaacgagattctattccctttcttccaattctagggtttctntctccactagggttcccaattcctct

SEQ ID NO: 1701 - DNA, 299 bp, Glycine max
  unsure (1)..(299): unsure at all n locations; Clone ID: 700555465H1
gagagttggtanccatttgtgantctganaaacccatcaagatggatcncgacagttctattgggaaagttttcaagttcacacatgttctggctgcctccttcgccggttcagttnnnnnnnnnnnnnnnnnaagctaccggcgggcaccgtccacggtggtgggagagcagaagaaggttattcccgagctacgtaggacggaatctgggcgtctcggggagatggaaaagttctcccactatgttgcaaggcaaatggggttgaagatgctgatgaggttccagagctatgcatat

SEQ ID NO: 1702 - DNA, 296 bp, Glycine max
  unsure (1)..(296): unsure at all n locations; Clone ID: 700555466H1
ggtcaccctcccctcggatggtcagatacattggcttacctggtcttgcctgtgttgctggtcgtctctcagtacatcactgtccaaataatgcagtcatcacagcctaatgatcccaacatgaaaagttctcaagccttgaccaatttccttccattaatgattggttactttgctctctcagttccttctggtcttagcctttactggttaacaaataatatattgagcatgcacaacaagtatgggttcnaaagttaggangtgtaaaaatcctgtgangcaagtcccagatg

SEQ ID NO: 1703 - DNA, 297 bp, Glycine max
  Clone ID: 700555467H1
cttgttgcagccatggccacccacgcggctctagcttctacaaggatccccactaacaccaagttcccatccaaggcttcacactctttcccaacccaatgcgcctcaaagagacttgaggtgacagaattctctgggctaagatccacttcatgtgtgacatatgctaacgatgctagagaatcttccttttttgatcttgtagcttcccaactcactcccaagaccaatggatcatccaactcctgtgaaggggagagacagtggccaagttgaaggtggcatcaatggtttcgg

SEQ ID NO: 1704 - DNA, 295 bp, Glycine max
  Clone ID: 700555468H1
cacagaccccatctgtttcccgtaaccactccatagccagtacaccttatgttcagccatctcttaggtcctcctaccatcaatccccctccctaagcatcagccgaagctccgtagatcttaggaatgcatcccaaagatctctagcttctcacttgaattcaccatgttccatgggatacccatctttgtcatctcttaactcaaggtacatgtctccacacattccaagtccaagcaatgcttcagtaagctatatgggttcatccagtcatcaacaacatcctctccgtta

SEQ ID NO: 1705 - DNA, 292 bp, Glycine max
  unsure (1)..(292): unsure at all n locations; Clone ID: 700555469H1
ctacgaagggctatatagcataaacatttgagtcttcattgcacaatgtcgacctcttccattaacgggtggtgcctctcttccatctccccagccaaaacctctctcaagaaggccacattaggcccttctgtcttcgcaaccgttagcactcnnnnnnnnnnnnnnnnnnnnnnnnnnnnnnnnnnnnnnnnnctcattcaagacagggctgtctttgctgcccctgccnccatcatcaccccaatgtgagagaggatatggcaaaaggatacgagcaagtaattgaaga

SEQ ID NO: 1706 - DNA, 286 bp, Glycine max
  Clone ID: 700555470H1
agcgtacctcctccgagacagcaggtggagtagttataacttcagaaagttcaaatacccaagggaggaactgataaatatatatacctgctaagtttcaactgtataatcttcaaattaaattttatcacattaattcttgatctttttccacatcatatcttcatttttttggtccacatgctgtagcttttaggcaataatggttcgatctgatcagatgagttgtgttccccacagctatgggcattcaaaagttggactaatcatctacttcatggagatt

SEQ ID NO: 1707 - DNA, 295 bp, Glycine max
  unsure (1)..(295): unsure at all n locations; Clone ID: 700555471H1
cttcacaaaactcagtttccaattcaccaaactcacaatggttganctagattggcaaacaaagatggttcactccaacatcatgcctccaatgtcccccaaactctctctcccggatcataacattccaatcccaactttgcaactcccccttcgccaaaacgacatcaccgcagcgtcgtctcctatctgcgctgcatacgacaactaccttcgtctccctnagctcagagccctctgggcctccaaggacttccccaattggggccaacgagcccatcttaaagcccgctta

SEQ ID NO: 1708 - DNA, 281 bp, Glycine max
  unsure (1)..(281): unsure at all n locations; Clone ID: 700555473H1
tgaactttgtccatgatagtctgttttgtgatattcatttgcttatccgatancacaagtaaaaactgagattaaacctgttcttatatgttggaaagttgaacatagtattgtctaataaagtgggaaatttggtggatgatgttgaagtccttctcaacttggaagtaattggttaatcaagctgtgcctgaattatntcattaattgtgaatcttatctcntccctgtngtntacacaagttatctgggttttaaattaagtntccaatncttgccag

SEQ ID NO: 1709 - DNA, 294 bp, Glycine max
  unsure (1)..(294): unsure at all n locations; Clone ID: 700555474H1
cacatccatctttgccttctgcatgttggttctctgtaaacagatactgcaaaagnagaataagcattgaatatttggttgggttgantccctggnttgangcgttgcagacatcacgggctattctaagactgtctcncctctctcattcatgtcccaactgtacgacggaggacaggttgcgtaactgccancaacccttcgccgcacggtgggcgtggtgctttggccttctgaaggtggtagcccttcagacttgctctcttagctggtggtngttctgctgtcttctag

SEQ ID NO: 1710 - DNA, 286 bp, Glycine max
  Clone ID: 700555476H1
tgtagacagagaaggtgcagggaaacacattcaagcaggagctaagaaggtgctcattactgctcctggtaaaggagacatccccacatatgtggttggtgtcaatgagtatgattacagccctgatgaacccatcatcagcaatgcatcttgcaccactaactgccttgcaccctttgtcaaggtccttgatcagaaattcggtatcatcaagggcaccatgaccaccactcatcctacaccggcgaccaaaggttctcgacgcgagccaccgtgacctgaggcg

SEQ ID NO: 1711 - DNA, 290 bp, Glycine max
  unsure (1)..(290): unsure at all n locations; Clone ID: 700555477H1
agaaagaacaccaagcaaagcatagtaacctaattcactttacacctaccaccctccttctaactcaattccatttttcttccttattcctctctcaaaccataatatgcagactctttcgccgcctacttccaacgctctcaatttgaagcacgttcttcgcccgcgtcgagtcgcgcctagccgaatctttgtcaaatgcgccttcgcgtctgagcccgncagctacggggtcggctcgagccgagccgattggcagagctcctgcgccatcttagccagcaaggtcg

SEQ ID NO: 1712 - DNA, 90 bp, Glycine max
  unsure (1)..(90): unsure at all n locations; Clone ID: 700555479H1
cccagagccactcgagaaaagcagcntagtgaganactacgtatactacgtagtactacacatttcatttgcctcttgtagtagccatgg

SEQ ID NO: 1713 - DNA, 288 bp, Glycine max
  Clone ID: 700555480H1
agcgtacctcctccgagacagcaggtggagtagttataacttcagaaagttcaaatacccaagggaggaactgataaatatatatacctgctaagtttcaactgtataatcttcaaattaaattttatcacattaattcttgatctttttccacatcatatcttcatttttttggtccacatgctgtagcttttaggcaataatggttcgatctgatcagatgagttgtgttccccacagctatggcattcaaaagttggactaatcatctacttcaggagattaaaa

SEQ ID NO: 1714 - DNA, 165 bp, Glycine max
  unsure (1)..(165): unsure at all n locations; Clone ID: 700555481H1
ctcttntncttctctctcaacaacttcaccttcttcctcctcgatcatgtctcacttcaagggcaagtaccatgatgagcttatcgccaatgctgcgtacattggcactcctggaaagggtattcttgctgctgatgagtcaacagggacaattggcaagcgttt

SEQ ID NO: 1715 - DNA, 138 bp, Glycine max
  unsure (1)..(138): unsure at all n locations; Clone ID: 700555482H1
gatttgttcagcaggctgtggaaggcagtggctggaaattattgaggganttcctgtacagtcttaggttttattaccctcacattcgttatnttcttatgtgtntgcnctgcgtttgatggtgtacggtaacctggt

SEQ ID NO: 1716 - DNA, 291 bp, Glycine max
  Clone ID: 700555483H1
gcaattgaagttgaagtcttgcccttctctcttcaactccaaacacaagacatcatcatccatggctgcctccgtctccactgtcggagctgtcaacagagctcttttgaacctgaatgggtctggacctggggtttcagctcccagttcatccttctttgggagcagcttgaagaaggttattggctcaagggtccccaacacaaagatttcctctggaagcttcaagattgttgctgtagaagagaagaaagagattgaagagacccagcagaccgacaaggacagatg

SEQ ID NO: 1717 - DNA, 91 bp, Glycine max
  unsure (1)..(91): unsure at all n locations; Clone ID: 700555484H1
atggcttcacgcaggctcgtatctnctctgattcgatcctcccttcgtagatctcaatcgaagccctcaatttccgcatcgaaancgagnc

SEQ ID NO: 1718 - DNA, 291 bp, Glycine max
  unsure (1)..(291): unsure at all n locations; Clone ID: 700555485H1
gacactcaaattacatggtcatagtgtacacctagttaggcaaacacaccaaacaccaaacaccaaactagttggctcaattctctttgaatggctttggaggctttgaattcaccaacagcagccaccactccgttccgtggctaccnnnnnnnnnnnnnnnnnnnnnnnnctgaccttcacttacgtgagccttgggctaaaaggaaacgctccaaacgaccgcgttttgagacggaggaagagtacctcgctctttgcctcatcatgctcgcacaaagcggtaacacc

SEQ ID NO: 1719 - DNA, 282 bp, Glycine max
  unsure (1)..(282): unsure at all n locations; Clone ID: 700555487H1
tttgagacgtggctggttcaactgaggtgatggctttgaatttgccttctcccgncccaagtgaagcccttatttttctcttcaaataactccacaaaacttccaggtagcttttctttgaagagaaaagatagtgacacaacagtagagagacgagtttattgctctgccgctgctcaatcaccaccaccagnatggccaggaacagcaaanggcgagncttctgatttcnagacatgggatgggcaaaaacctattccgtcttaggatctaggggttcaa

SEQ ID NO: 1720 - DNA, 293 bp, Glycine max
  unsure (1)..(293): unsure at all n locations; Clone ID: 700555488H1
gcagaaagaaattgcaccaatcaaggatgggactactggnncagttatagttctcacaactccagatgcaagcattgtgcgctgggcatctggagttgtgagaactataactgttccagtagtcccagcgcacaatgcttgcatatcagggcacatcttcaactgttaactatgatgcatccttagctaatgcagtttccaagacaaacatacttnnncgncgaagggtatctatttgaacttcctgataccattaaaacaataaccaaagcatgtgagaaagcacggtcgaa

SEQ ID NO: 1721 - DNA, 286 bp, Glycine max
  Clone ID: 700555494H1
gcaaagggaatgcaagtgcttgaatatgttggtaaggagacaatggacttattaatcagtgaaactggaattgaagttgagaaagataaaaaagaaggtgaagaagaacaatgatgaggatcaattatcagagggaagtgacttttgatcgatgcttttacatttatggaggtccagaacaattggaggaactggaggcttgtctagtcattatgcattgttatttaaccgaagaaagcaagctatcagctgagccaaagtctgtatatgatgggagcttaaagag

SEQ ID NO: 1722 - DNA, 287 bp, Glycine max
  Clone ID: 700555496H1
gagagagagagatggggctaagaagtaaattaagaatgtcagcgtcagtggtgcagcaggggatgaaggaaataagaaggagcgtgacgtacatgcctcgaccgggggacggtgcgccgcggggggtgacgctgataccgggggacggaattgggcctctggtgactcatgcggtggagcaggtgatggaggcgatgcacgcccccatatacttcgagaagtacgatgtgcacggggacatgaggcgtgtgccggaggaggtgctggattcgatacggaagaacaag

SEQ ID NO: 1723 - DNA, 282 bp, Glycine max
  unsure (1)..(282): unsure at all n locations; Clone ID: 700555502H1
cttgtttgtaggcacgagtgacgagagagggtgtctccggaaaaaacaantgaggntctatggctgctgtgaaagcagagaacgtgtgtgcctcgccatcgctgaaaatctccaaggaatggaccccagacatgcttctgagacnttgcacttcgttgacgntatgggnnctgnnacgccccttcccggaactncaanggcgtggnntntatgacgncttntagggagcttcctcaaagtcgataacntccanagtnganggcattcattcaccgtnntggg

SEQ ID NO: 1724 - DNA, 284 bp, Glycine max
  unsure (1)..(284): unsure at all n locations; Clone ID: 700555503H1
gaagaacaagtagttgagaactaagaaggagaagcaaatggcttcctcaatgatctcttccccagctgttaccactgtccaaccttgccggtgccggcatggttgctccattcactggntcaagtccatggctggnttccccaccaggaagaccaacaatgacattacctccattgctagcaacggtggaagagtgcaatgcatgcaggtgtggccaccagttggcaagaagaagtttgagactctttcctacctgccagaccttgatgatgcacaattggcaa

SEQ ID NO: 1725 - DNA, 283 bp, Glycine max
  Clone ID: 700555504H1
caaaaaggtaaacttctgcaacaaccatggttgccaatggcagcagcaacagcatcctcccagttgattttctcaaagcctcgttcaccctcgcgtctctgccccttccaactatgtgtctttgacaccaaacaagtgctgtcaagttcaagtggcaggagaaggcatgtggggggttctggagttaggtgcatggcggtgggagaagctgcaaccactgagactaagaagagaagtggatatgagcttcaaacactcactaactggttgctgaagcaggagc

SEQ ID NO: 1726 - DNA, 282 bp, Glycine max
  unsure (1)..(282): unsure at all n locations; Clone ID: 700555505H1
tgaccccaactccattctcctctatttttcccaccatggacctttccatcaacacacgcaccncccacacgccgcatcatcgcttcgccaccacacgccgcggttgagatgttcccgccgccgacgcagacgaccctcccctctctgccggatctcctcctcacggccctctccgtctgcttcctagtctcctcctcgaagccccacatcggtggttccacccgctgccccttcccgcgtcgattcctcaaaatccccgccatgtccctcacaacgataaca

SEQ ID NO: 1727 - DNA, 282 bp, Glycine max
  unsure (1)..(282): unsure at all n locations; Clone ID: 700555507H1
aaaagaacaaaccgcagttcttcctaatcgaaacggttccaaagtagtgaataaacaaattctcgtgcctagggttttccctttcttcgattcacactcccagagcgaanaacccgtcatgggaggaggcgaggagaagcgacaccagatgatgcagaacctcttcggagatcaatcggaggaggaggaagagctcgacgtcgattccgagcacgaatcgaacccgcaacaaaattncccctccgacgagggggagggggagggtgtgggggagcaggaggg

SEQ ID NO: 1728 - DNA, 264 bp, Glycine max
  unsure (1)..(264): unsure at all n locations; Clone ID: 700555508H1
aagttggtgcagatgttgtgtttncagcaagaacccatgacacagaaatcataaatccngcccatcatgaaatgggcgctgctggtgcagaaaagaattctgaatccttatctttcagtggaacagccacatccaggcaagctgctcatggaatgcacggtagaggcatccatcgtaacaaaggaagatcaaacaatcaagatgctgatggttggcgaaaganatctgtggttgaagattcttcagcctcatctggtgcacagt

SEQ ID NO: 1729 - DNA, 283 bp, Glycine max
  unsure (1)..(283): unsure at all n locations; Clone ID: 700555509H1
ggggaaacctgttctggtggtaagtgtgaggtgcgtgctgaaattagaaaggcagttcattcatctaacacaatgtcatctgctggtgcttcagaagctgtattcttgtgttctcaatgcgaaaggaaggcttgcagagtttgctgtgctgggaggggggcatttctgcttgtagganataattcaagagaggtccaagttgactttcctgtaaatcgtttattagctcaggatggtataatttgtaaacggtgctgccaggatattgtgcttcatgcattga

SEQ ID NO: 1730 - DNA, 281 bp, Glycine max
  Clone ID: 700555510H1
gtgttgatttcatggccacctcttagtcccagcatcgctgcgtttttgtggaattttgcaatttggattaatgggtttcgactttgcgttctgaatggttcgtgcactcacgaatacgtgaccacttgcagctaaaacattgacctcctgtgatcatttgaaggaatgtgtagtcgtgaatcaattgtgttgctgtttgctggaaagtggtcactctgagttttagatgctattgtctttgctgtgaagttattttatttggtcctgattgtatttcaggg

SEQ ID NO: 1731 - DNA, 282 bp, Glycine max
  Clone ID: 700555511H1
gcaaaactaagaatgaaggaggagttggtggttgaagaagggtaccttttcaaagaagagactcacttcacagtgctcaaaactctctcttcttcaacggtgatggcttcgctgtctacgattgcaaaggccaactcgttttccgcttcgactcctacggtccccgcgcgcgtgacaaggacgagctcgttctcatggatccccatggccgttctcttctcactctccgccgaaagaaaccgagtcttcatcaacgctgggaaggcttcaaaggggagagaa

SEQ ID NO: 1732 - DNA, 250 bp, Glycine max
  unsure (1)..(250): unsure at all n locations; Clone ID: 700555512H1
caaatgtatttggctagttattttcaacngtaattgcgntcagcttagatgttaganttcgattnaccaatatgtctcatcaatatcatgtcagcttggacataaaatggtaaatgcttagacgtagaatcgtgtataccttgatttattctagttaataactcaattttattgtttataanannannaaannanaananaannaannaannanaanaaggggggnncccccncanatgccccccccccc

SEQ ID NO: 1733 - DNA, 283 bp, Glycine max
  unsure (1)..(283): unsure at all n locations; Clone ID: 700555514H1
gattccacaacagtgggagggngatccaaaaagagagagtggaaaagatggcgcggttgatcacagtggtgtggtgcgcggtggcggtgctattatgcgccgcggccggtgcgtcgtgggtggaggaggcggcgaacccgatacgaatggtgtctggcgtggaggcggaggtggttcgggtgatcggggagtgccggcgtgcgttgaagtttnctaggttcgtgagcaggttcgggaagagttaccaaancgaggaagagatgaangagaggtacgagatatt

SEQ ID NO: 1734 - DNA, 286 bp, Glycine max
  unsure (1)..(286): unsure at all n locations; Clone ID: 700555515H1
ctgtttcccatgatcagctttttagcattattgactattccccaagctgggcatttgaagggtcagaaattaaggttatcatttctgncgaattcctaagaagtcaacatgaagcagaacaatgtaagtggtcatgcatgtttggtgaggtagaagtgccagcagtgatcattgcaaaaggtgttctttgttgtcatacacctccacacaaggctgggatggtacctttctatgtaacttgttccaataggttagcatgtagtgaagtgagagaatttgatttcca

SEQ ID NO: 1735 - DNA, 288 bp, Glycine max
  unsure (1)..(288): unsure at all n locations; Clone ID: 700555516H1
ctcccttatccatttccacaccacannntanancacaaccaacgctctctcttcagcctccattctacgctctcccaaangccagtctctnacccgaagagcgaaccataatggaagagtaaattaccggaaaccgaataaccgtttctccgtgaaagcctccgcnaaagagattgcctttgaccagcattcccgctctgctatgcaggnnggcattgacaagctcgcngacnctgttgggctcantcttgggcccagaagnangaatgttgtgtttgatgantttgg

SEQ ID NO: 1736 - DNA, 148 bp, Glycine max
  unsure (1)..(148): unsure at all n locations; Clone ID: 700555517H1
atcctccncctaaaaattggtcaanatctatccaatctctttgncatattccttcttatnntcatctncgtcttcntcnctntngcntctagaattgaaaagttctncttcctgccanagtntttgacaccctnttccancctctaga

SEQ ID NO: 1737 - DNA, 282 bp, Glycine max
  unsure (1)..(282): unsure at all n locations; Clone ID: 700555518H1
tctcttcaaactagggttttacagaatataagctctctctatctttggttttcgtcattcaaatccaatccaatatcaaanatgagtcgtcatcccgaggttaagtgggctcaganacttgacaaggtctatatcacggtgcaattggctgattcaaaaaatgccaaggtggatcttacaccagatggtatttttaccttctctggtagtgctggtgctgaagaccatcagtatgagctaaaactggagctctttgacaaggttaatgtagaggagagcaaa

SEQ ID NO: 1738 - DNA, 280 bp, Glycine max
  unsure (1)..(280): unsure at all n locations; Clone ID: 700555519H1
tctcaactctctccaacaaccacaatggctctcttgggcgccgcctcctcctccgctcgcatcattccctccgtctcactctcttcctcttctcgctccttcttctcactctcatnctcttcttccaaactccaatgcttgcgctcctctcctcgtatttcgcacctctttctcaatcagcgaaganggaggttcgcgtttcgagtggaggatacgganctgtgtcggcaccgaagtcagttgcgtctgatcctgatcagttgaagagcgccanagaaga

SEQ ID NO: 1739 - DNA, 278 bp, Glycine max
  unsure (1)..(278): unsure at all n locations; Clone ID: 700555521H1
gatgccaaaagatggaaaattgaaggtgaaaatgagggtatgtctgcccctggaagtagaacagtaagagaacctagantgtagttcagacaaccagtgacattgatatcctagatgatgggtatagatggagaaaatacgggcagaaagtagtgaagggcaatccnaatccaaggagttactacaagtgtacacacccaggatgtccagtgaggaagcatgtggaaagagcttcacatgacctaagggctgtgatcacaacctatgaggggaagcac

SEQ ID NO: 1740 - DNA, 282 bp, Glycine max
  Clone ID: 700555522H1
agcagaaggaggagaagcagaaagaggagacgaagcaatggcgccgaagaagccccgaaccacgtcgaggaaccctgatttggtcaggggaattggcaaatattcgaggtcgcagatgtaccacaagaggggcatctgggccatcaaggccaaaaacggcggtgttttgcccctccacgatcccaagcccaaacccgaggccccggcccagaagccgcccaagttctacccggccgatgacgtgaagaagcccctcgtcaacaagcacaagcccaagcccgc

SEQ ID NO: 1741 - DNA, 281 bp, Glycine max
  Clone ID: 700555523H1
acgatacgtaataagttctatcattgaggaagtttcctgtgcatcgtctccgaaaatgaacgacgcagatgtctcaaagcaatccagcagatggtgcagttcatccgccaggaagctgaggaaaaggccaacgagatctctgtctccgccgaagaggaattcaatatcgagaagctgcagttggtcgaagccgacaagaagaagatcaggcaagaatacgaacgcaaagagcgccaagttgaaattcgcaagaagattgagtactcgatgcagctaaatgc

SEQ ID NO: 1742 - DNA, 283 bp, Glycine max
  unsure (1)..(283): unsure at all n locations; Clone ID: 700555525H1
ccgaccatggaagccacggcctccgcaatgagcttcgcccttccctcaacaaaagcccaagcccaagcccaactcctgaccggcccaccaatccattcaccattccctcccgcagcccagcccaccgccccncgccgcgcctccccaccatccgcgccgcaattccccgcacaaagaaagaggcaacggtggagactgtgcgggagcagctcgagaactgttacctcctcgccggcatcaactacaagggcttcacggtgaagcagttccaggagcttcgaaa

SEQ ID NO: 1743 - DNA, 272 bp, Glycine max
  unsure (1)..(272): unsure at all n locations; Clone ID: 700555526H1
ccctttcattttccctcactttctcgctcgccaaacgcccctctctctcctccantggccgaccagctcaccgacgaccagatcgccgagttcaaggaggccttcagcctcttcgacaaggacggcgatggttgtattactactaaggaacttgggactgtgatgcggtcactagggcaaaacccaactgaggcagaactgcaggatatgattaatgaggttgatgctgatggcaatggaaccatcgacttcccagagttcctcaacctgat

SEQ ID NO: 1744 - DNA, 280 bp, Glycine max
  unsure (1)..(280): unsure at all n locations; Clone ID: 700555527H1
tcccctcctcaaccaaacaacgctcttcaatctccatcagagcctcggtctccgagaaacccccgctaccggctgtgtcgtgacctccccggagcccagcaagcttccgatccgcaaaatccccggcgactgcgggttcccggtgatcggtcccttcaaggaccgccaagactatttctacaagcaagggcgcgacgagttcttcaagtcccgcatccaaaagtaccagtcaacggtcttccgcaccaacatgcncgnaggccccttcctcgcccccgac

SEQ ID NO: 1745 - DNA, 282 bp, Glycine max
  Clone ID: 700555528H1
gaacatccatgaacagaaaccgtactcttatcactgcttcaactgaggaatctcgtgatcctacagccaatacactgtggcatggaaaagatgttagggatggagctgtgtctacacagttggaagacatggatgagttgaaaataagcagtggagcaggactgtcagctggagagtgggctgatagccttaccaacattagtgtgggggatctactttcaggagtgtcccaggatcttgataactgcatcgatcctcctattgcagagaattttcatgata

SEQ ID NO: 1746 - DNA, 243 bp, Glycine max
  unsure (1)..(243): unsure at all n locations; Clone ID: 700555529H1
tgaatcgcgattgttctgtgcgagagaaagaagagagagatcgaaaatggcgttggctttcgacgagttcggaaggccgttcataatcctgaaggagcaggagcagaagagcagactccgagncttggacgctcagaaagccaacatctccgccggcaaagccgtggctcgcatcctccgaacctccctcggccccaaaggcatggacaagatgctccagagccccgacggcgacgtcaccat

SEQ ID NO: 1747 - DNA, 281 bp, Glycine max
  unsure (1)..(281): unsure at all n locations; Clone ID: 700555530H1
gagccaaccaagaaggccactgggaatcagtatggatcagttgattcaggaaatgctgcgaatggccagatcccatcgtatgatcggcctgtaaccccagtgttgcaggattttattgntcctactatgtgttacctcccaaatggttacccatccactgcctattattatggtggttatgatggaatggtaacgagtgggatgattattctagatatntgaattcggnaggagttgagatgacttcgggagtttatggggataatgggtctctactttat

SEQ ID NO: 1748 - DNA, 281 bp, Glycine max
  unsure (1)..(281): unsure at all n locations; Clone ID: 700555531H1
acagtttcgatcgtntgcattgcaacacacacacgcacacagaacactagaatcattattcgcttcagggttggaggcacaatttgcaccggtagctctatcacttggatcacgcggaaccctttggctgaaacttttatcgcttcttttcttgttttgtttccttgaaaaatctaataatttgcggctattctagtaacttactgagttaccaagaatgatgcctgcatacagaagcatggactcgtaccccatgtcagaggnaccngtacctttncctc

SEQ ID NO: 1749 - DNA, 284 bp, Glycine max
  unsure (1)..(284): unsure at all n locations; Clone ID: 700555532H1
cttggtttgcctcttgtagcttgagacttgaggagaatggataccttcctgttcacttctgagtcggtgaacgagggtcatcccgacaagctgtgtgatcagatatctgatgcagtgctcgatgcctgcctggagcaagaccctgaaagcaaggttgcctgtgagacatgcaccaagaccaacttggtcatggtatttggagagatcaccacaaaagccaatatngactatgagaagattgtgcgcgatacgtgccgttctataggatttgtgtctggtgatgt

SEQ ID NO: 1750 - DNA, 280 bp, Glycine max
  unsure (1)..(280): unsure at all n locations; Clone ID: 700555534H1
ctggtcttactgtgtggtgactgtgctctgctctcatctcattcatattcatttcaatggcaactcaaggtcaagtcntacctgcaaagctgcggtggcctgggaacccaacnagcccttaaccgtccaagacgttcaggttgctccgcctcaggccggcgaggtccgtgtccaaatcctcttcaccgntctctgccacaccgatgcttacacttggggcggcaangatcccgaaggtctcttcccctgtattctcggcnacgaagctgcagggattgtg

SEQ ID NO: 1751 - DNA, 277 bp, Glycine max
  Clone ID: 700555537H1
cggttttgaatcttttgagcgaaaatgcagtcgagtcctttgcttctggaggaacccataaggatggcctccatcctcgagccatccaagcctagtttctttccagcgatgacaaagattgttggcacacttggcccaaagtcacgatcggttgacgtgatttcccaatgtcttgaggcaggaatgtctgtggcaaggtttgatttttcatggggtgatcctgaataccaccaagagacgttggaaaatttaagggctgctatcaaaagtaccaaga

SEQ ID NO: 1752 - DNA, 276 bp, Glycine max
  unsure (1)..(276): unsure at all n locations; Clone ID: 700555538H1
gaaatataaaagtttatttcctctgatcgtgtggtttctgagttctaagcactcacctctttcatacacgtttgttcgcttgttgagaagccatgggcgaggatttcgagttcccaagtgctggcaacatggaaatgcctgaggaggaagagtttgagagtccgatcctgaaggttggggaggagaagganattgggaaaatggggctgaagaagaaattgctcaaggaaggtgaaggttgggacacccctgacagtggagaccaagttgaagtgc

SEQ ID NO: 1753 - DNA, 268 bp, Glycine max
  unsure (1)..(268): unsure at all n locations; Clone ID: 700555539H1
cacctttgttcactcttcttctcttgcggctagggttttagcgcantttctttctagntttaaggaagagggtaagggaaaaggtcccatcagtattgtggtcatttgccatntcgactcggggaanccnctaccactngncncctganttacaagcttggnggcattgacaancgtgttattgagaggtttganaaggaancngctgagatgaacaagaggtctttcaagtatgcctgggtgctggacaaacttaaggctgagcgtg

SEQ ID NO: 1754 - DNA, 228 bp, Glycine max
  unsure (1)..(228): unsure at all n locations; Clone ID: 700555540H1
agaatgctccgagtttctctttcagacactagtagacagagaaagagagtgtgtgtgactctgtgagagtgtgcgatgatgatgcgaagaagaaccaaacaacgataaaacaaaacgacattcacaaatctgcgcgaacctctcantctcatttcctgagaattctctctcactgcgctgcgctgcgttttgtctccgccaccgtcgtcgtttcggcttctcaaaagc

SEQ ID NO: 1755 - DNA, 278 bp, Glycine max
  unsure (1)..(278): unsure at all n locations; Clone ID: 700555542H1
cccctttctctcaattttcattcaacaccatggcaagaanaaccaagtccattttcttcaccttcttattatgctcttgggtggtggtagtagtagcccaagaggtagcaattgcaaaatccgaaagtgaagcattaggggaaccggaattagaaaaaagagaaacacttgaaatcatcatnnnnnnnnnnnnnnnnnnnnnntaccctgctccttctccttctccatcttcccctgcatattgcccacctcctccaccaaaaccactgagccggtta

SEQ ID NO: 1756 - DNA, 278 bp, Glycine max
  unsure (1)..(278): unsure at all n locations; Clone ID: 700555543H1
caaagacacattctttcagcctcccttcaacacccttttggncccntcattcttccaagtctcaaatcgaagctcgaagacctgcgaagaacaaagggttgtttaaattctgtgtggttgttgttggaggttgaaatacaagttgccgcctcaagtgtgtgttaatcttaaatttcacaagcaagtgtatttttggagtattgtattatatgaccaaatattttagtgttttaggactagatattttgcttctggtggcaatttttctcttctccttc

SEQ ID NO: 1757 - DNA, 278 bp, Glycine max
  unsure (1)..(278): unsure at all n locations; Clone ID: 700555544H1
cttatccttattgagagaaaaaatggccaaatcaatcaaattctttgagttgaacacaggggccaagattccttctcttgggttagggacttggcaagctgaacctggtgttgtagctgaagctctcaccacagccattcaggttggatacaggcatattgactgtgctagtgcgtataagantcaagcagagattggttctgctcttaagaagctttttgatgatggtgtggtgaagcgtgaggacttatggatcacttccaaactctggtgttcag

SEQ ID NO: 1758 - DNA, 279 bp, Glycine max
  unsure (1)..(279): unsure at all n locations; Clone ID: 700555545H1
gataaactcaaaagccggancagaaatttttcagctttctaccgggggaagttctgcttgcatcgttggatggattcagtaaagtgtgtgatgctgttgaagtagctggaaaaaatgtcatgtcaacatcatcaactgtgacaactgagcttgtcgatcacagatatggagaacaagcagctgaagcaacaagtgaagggtttagtgctgctggtcatgctttgggtactgcatgggctgcttttaagattaggaaggctctcaaccctaagagtgttc

SEQ ID NO: 1759 - DNA, 279 bp, Glycine max
  unsure (1)..(279): unsure at all n locations; Clone ID: 700555546H1
gcagtttcccgataacgagccagtatgttttttaaaaaataaattataacatcattgtctattttatgttttgtaaatttcttactcttaacttgtttcttcccttaaaaacatggttctttttttattttaagctttataaaanaatatttacttccaatctctatattttagtctacttttaagaataanaatgtattcnacattacttgttattatctcaaagtgctatnaattaatggtaactcttgtttganttttctccagcttatcgtgaga

SEQ ID NO: 1760 - DNA, 280 bp, Glycine max
  unsure (1)..(280): unsure at all n locations; Clone ID: 700555547H1
gtgctttctcccctgaatctcaccactctccgatctttcattctcccctcttttctagctcccgtggagtctggaaggttctgcgagccttctcgctttccacgtgttttgcttttttccatttctctctctcccgtggagtttagaagtgtgcgttccggagccttttngctttccatttctctctctcccgtgctttctagagttggtgctctgggaggagtaacgattcagcggttgaattgcgagaatggaaagcgttttagagagtgtcatgggg

SEQ ID NO: 1761 - DNA, 282 bp, Glycine max
  unsure (1)..(282): unsure at all n locations; Clone ID: 700555548H1
ctggtgattgatgctttagagcaaagnagaagagatgatctcgagtctcttggttatgttttgatgtacttcttgagaggaagtcttccttggcagggtcttaaagcgggaacaaagaaacagaagtacgagaaaatcagtgaaaaaaaggtttctacctcgattgaagccttgtgtcgaggttatccaacagaatttgcatcttacttccattactgccgatcattgaggtttgatgataagccagattatgcttatctcaaaggatattccgtgacttgt

SEQ ID NO: 1762 - DNA, 277 bp, Glycine max
  unsure (1)..(277): unsure at all n locations; Clone ID: 700555549H1
gaggcgcctctgttattatcggagaagagaactggatcgattgaagaagagagtggaaaatggagctcgtatcagtatgtgggtggaaccggttctgtgaggccaacttcttcattggctggaactgaggtgagtgtggatgaaattcgatnnnnnnnnnnnnnnnnnnnntactatcccccttcccttcatggagccttggttggntcacctgagcctgatcctacagagcaagctcttgtttatcagggtggatatggaggagattatggtggac

SEQ ID NO: 1763 - DNA, 278 bp, Glycine max
  Clone ID: 700555550H1
gtgtctcagagggtctgtgacacacagactcacttccaagttccaagctttggccatttattcccactgtttattgagaacaactgcagaacatggcacagattttggctccctctacgcaatggcagatgagaatctcaaaatcctctcccaatgcaagtcccattacatcaaacatgtggagttctttattgtggaaacaaaataagaaagtttcacccacaagttctgctaaatttagagtgatggcaattaagtctgacaatagcatcatcaac

SEQ ID NO: 1764 - DNA, 276 bp, Glycine max
  Clone ID: 700555551H1
catgttcttgtacagtgtcttatattgtttgattacttgaaggcccctggaaaaggtgacaaggatttgccatctgaaaacatgaaagaagagattacatcatgggaggaacgtgttaaaaaacttcttgaactgacaccaccaaaagggacagaatttcttcacaaaattgagcatatattggaacgagaaaaaaattgggtgtggtggaaacgtgatggctgcctcccatatgaaaaacaacgtatagagaagaaagcagtaccagatgggccc

SEQ ID NO: 1765 - DNA, 273 bp, Glycine max
  unsure (1)..(273): unsure at all n locations; Clone ID: 700555552H1
cagctacctatccaacttttggaccggttcgancaatatatttgttattaattacacataaagaaaagactatcttaacttcgttcgtttggaacaagagtttgtagagaatctctcgatgatggcaaacagttgtgtttcaatggacaataataatatcctgggtcttctcaagcttcgaattaaaagaggcgttaatcttgcaattcgcgatgctcgtaccagcgatccgtatgtcgtcgtcaacatgggtgatcagaagctgaagactcg

SEQ ID NO: 1766 - DNA, 275 bp, Glycine max
  Clone ID: 700555553H1
gcaaaaaacacgaggacgttcctattttctccatgctaacaccttcgttcctccacgatttcgccattacgaagacatacgcgatcttctgtgatattcagctcggattgaaccctcttgacatgatctccggtggctcccccgtcggctccgtcgcctccaagttcccaaggatcggaatcctccctcgtgatgctaaggatgagtcgatgatgaagtggtttgaggtgccggggttcaacatcattcacgcgataaacgcgtgggaggaggac

SEQ ID NO: 1767 - DNA, 163 bp, Glycine max
  Clone ID: 700555555H1
gtttcagattcagaagtcaatcccaaatctgcacctaattcctcacacacaactcagttacatgtgacactcactagattttgtagtgactgtattatgtatcaatattattctgtaccaatcctcatgtaatattgcaatctaatagttgtgccatttaaaa

SEQ ID NO: 1768 - DNA, 275 bp, Glycine max
  Clone ID: 700555556H1
ggtaatttggaggatccagttggagtgccacctgagtgggccccgcctaatgttagtgtccccattttggatttggtgacaacatatttcagcttaataaaagaggctggataagaaggcaggtctattggatttcaaaacagatattacagttggtgatggaagatgcaattgatgattggcttctgagacagattcattggctccggagagaggaaactgtttcccaagggattcggtgggtccaagatgtcctgtggcccggtggtacattt

SEQ ID NO: 1769 - DNA, 189 bp, Glycine max
  Clone ID: 700555557H1
gaagaagagaaggtggtaccgccttcaattctctctctccatttctcatcctcatcatcttattatacctcttccatctccataacatccacttgtgaaaaaaacccattaatatatatcacacacacatgtatctctgagctccaatccaatccaagaccacaccttgtcgcgtcggacgaaccttgg

SEQ ID NO: 1770 - DNA, 272 bp, Glycine max
  unsure (1)..(272): unsure at all n locations; Clone ID: 700555558H1
actagttctagaatgtntgangagcggcctatatggtccaaaaattcgcttaccgaactcttgcttgataagggctaagcttttcgcacagcatgctcngaaggcttctatctagaatttcntactacttttctagtggaccatttctgaggttttggatcaaganaggatatgatccacgcaaagatcttaattctcgaatttatcanagaattgattatcgagtacctgttccattacgaattactgtgatgctcatcagccaataaatc

SEQ ID NO: 1771 - DNA, 267 bp, Glycine max
  unsure (1)..(267): unsure at all n locations; Clone ID: 700555559H1
aaggaactgagcagggagttagggttagagccattgcaggttaagtnttggtttcagnncaagcgtattcagatgaagacacagcacgagcggcatgagaatacaaatctcagaaccgaaaacgagaagcttcgagcagataatatgaggtatagggaggctcttagcaatgctcgtgtcctaattgtggtggaccaaccgctataggaganatgtcattcgatgaacatcacttgaggcttgnaaacgcaaggctaagagaagagg

SEQ ID NO: 1772 - DNA, 276 bp, Glycine max
  unsure (1)..(276): unsure at all n locations; Clone ID: 700555560H1
gaaatgggagaacagaangacattacgctgacatgggagantttggaagctactgttacaaatggaaagaaccganaactaattcttcatgggcttacaggttatgcccagccagggagacttttggctataattggtccttctggcagtggcaaatccacacttcttgatgctttagcaggaagattgacatcaaacataaagcaaacagggaagattctaatcaatggccacaaacaagaatggcttatggaacatcaggctatgtaacacaag

SEQ ID NO: 1773 - DNA, 278 bp, Glycine max
  unsure (1)..(278): unsure at all n locations; Clone ID: 700555561H1
catttctcagaaaccctctcgaatgactgagtcaatgcccgccgtggaaccgtcgccggagcctccggcgtnccgatatcgtgttcgatgacttctccaccgacttcagcgcttccccatcccctccatggactcgctcttcaacactactgatggggcanccttcccctccgatctngaattcggcatggatttcaacaacaacaacgaagagtgaggggaaaactaagaaggttgctagtattagtttgttgggtttgtttttctttatcatgctg

SEQ ID NO: 1774 - DNA, 278 bp, Glycine max
  Clone ID: 700555562H1
attctacattgctccagcttttatggacaagcttgttgttcacatctccaagaacttcatgaccctgcccaacatcaggtcgctctcattcttggtatctggggaggcaagggacaaggaaaatctttccaatgtgagcttgtctttgccaagatgggaatcaaccccatcatgatgagtgctggagagttggaaagtggaaatgcaggagagccagcaaaactgatcaggcagagataccgtgaagctgcagacatgatcaagaagggaaagatgtg

SEQ ID NO: 1775 - DNA, 279 bp, Glycine max
  unsure (1)..(279): unsure at all n locations; Clone ID: 700555563H1
gcaatacttggtgtatttcattgtggcactgactatattcttctacatgattccaattacatttatatctgcattaactactttggataatttggtgaaatatctcccattcataaagccaattgttaatataaaggcattgaaaacagtgttggaagcttacctccctcaactcgcactgattattttcttggcttgttgcccaagttgcttctgtttttgtctaaatttgaaggcattccaactganagtcatgcagttaggggctgcatctggaaa

SEQ ID NO: 1776 - DNA, 277 bp, Glycine max
  unsure (1)..(277): unsure at all n locations; Clone ID: 700555564H1
aaattaaggcttttctataatgcttatggtactatgagcaaatctgatataacttctgataatgtcttttctttaaccccaggttattgctgaatatcttcaaaaaatcgatccaaaatcagatggcgcaaagagggattgggttgctatttatgatgaatgtgcctctgtcttatatcaggagattgattacaccaaggaggctgctaatgcagaattgtttgcaagtaactttaagaacatggattatgtgaaagttcctacnatctactgggat

SEQ ID NO: 1777 - DNA, 256 bp, Glycine max
  unsure (1)..(256): unsure at all n locations; Clone ID: 700555565H1
cgtagatagccgatgtgcttgtnttaangtgtcagtnattcctgttacctcaanncagctttgtagtgancagatataatggctgtngaaaggtccggaattgncananatgttacggaattgnttggtaaanccccattagtatntctnaatanacttgcggatggntgtgttgcccgggtngctgctanactggngtngatggagcnatgctctagtgtgaaggacaggnttgggtatagtatgattgctgatg

SEQ ID NO: 1778 - DNA, 276 bp, Glycine max
  unsure (1)..(276): unsure at all n locations; Clone ID: 700555566H1
gttctgtgctgcgcggacgaggcagcactgtgctgggaatgcgacgagaaggttcacgcagcaaacaagctccgccagcaagcaccagagggnnnnnnnnnnnnnnnnnnnnnnnnnnatgcccaagtgtgacatatgccagganatngttggttatttcttctgtttagaggatcgngctttgctatgtaggaattgtgatgtatctatacatacagcaaatgcctgtgtctctgatcatcaaaggtttttgcttactggtgtgagagtaggcct

SEQ ID NO: 1779 - DNA, 272 bp, Glycine max
  unsure (1)..(272): unsure at all n locations; Clone ID: 700555567H1
ggtgagtctagtcaatttctttttaaactctgcgatgctaaatttagcggtgtcactcacctgaatttntctgttttgtgatctttggggcctttatcaatgccacatctctttctttctctcttgatctcattttgtgatctttggggcctttatcaatgccacacctaaatttagcaatgtcactcacctgaaattaagtgtgtattctttcttttgcgaattttttntcagagttgatttgacgtaacccaaaatcgtgtttaatgttt

SEQ ID NO: 1780 - DNA, 273 bp, Glycine max
  Clone ID: 700555568H1
ctatcctcgtttgtacacacaccctgcacctccattgagttgagttcaaaactctgttctttcctccatgaattcaatttctttaggttccttcatcctcacaccatgcaagttccgcccttttcttcaaaccaaacaccaacccatattccacacactctccccaatctcccctgacacaaaaacccacttttcttcgagccacagactcgaacatcgacgcccccatttccctccccgagggcgcgtccttcgtttccatcccagaaatca

SEQ ID NO: 1781 - DNA, 272 bp, Glycine max
  unsure (1)..(272): unsure at all n locations; Clone ID: 700555569H1
gcagagcaggagtgaaggagaaaaggacccttgtccgtccagtccttattctcttttctcctccctccctcagcaaccgccaattcctgaaccctaagctagcgccatggctgtcgtttcgcgaagtgcgacgacctatacgcgccactacttaatacgacacgagtttgataggaaaacgaaaacctgcgttgccaataatagtttgtgttactctgctnannaggctcctccaccgcagaggattgttggtggccgtagagtgattgttg

SEQ ID NO: 1782 - DNA, 272 bp, Glycine max
  Clone ID: 700555570H1
ctcgtgtttccgtttccgtttcaatttcctctcacaggctttaaccttaccagctcgagataagacatggacggatcaaaggcccatggagtccggaggaggacgaggctctgcagaagctggtggagaaacacgggcccaggaactggtctctgatcagcaagtccatcccgggccggtccggcaagtcctgcaggctccggtggtgcaaccagctgtccccccaggtggagcaccgggccttcacggccgaagaggacgacaccataatt

SEQ ID NO: 1783 - DNA, 271 bp, Glycine max
  Clone ID: 700555571H1
gaagattcagcaagcaagacccctcatttccgtggttaacaaggctgcctctctatcttcccccgtgaccaccagcgtcggcgttcggtttcggctggacaatttggggccgcaaccgggttcgaggaagagggctaagagaaagggtagaggaatatccgcagggcaaggggcaagttgtggttttgggatgagaggtcagaaatctcgatctggacctggcgttaggaagggtttcgaaggtggccagatgccgctttatcgccgaatc

SEQ ID NO: 1784 - DNA, 275 bp, Glycine max
  Clone ID: 700555572H1
cagagcagcaggggctaaaacgactgaagaaaatccttcctgaaggaaagagtgggcaaccaatggattctagagaagcaatgaatcaagttacaaatacagtcacgctgttaaccataaaggtcatgctgatatttcatccagggatagatttgcaaggagtaatggtattcccatttctataagatataagaagttgggcaacgaggaaataagcatgcaaggagatcaccaccaaagagataggttgcaacagacatttagggaaccacctt

SEQ ID NO: 1785 - DNA, 243 bp, Glycine max
  unsure (1)..(243): unsure at all n locations; Clone ID: 700555573H1
gatggcgttgttggttgagaaaacaagcagtggaagggagtacaaggtgaaggacatgangcaagccgatttcggaagattggaaatcgagctggcggaggttgaaatgcccggcctcatgtcctcccgcaccgagttcggcccctctcaacccttcaagggcgctaggatcaccggctccctccacatgaccatccaaancgccgtcctcatcgagaccctcaccgccctcgggccgaggtc

SEQ ID NO: 1786 - DNA, 271 bp, Glycine max
  Clone ID: 700555574H1
tcctctttccttttctctgctcttgtgatgacagcgacttaatctctgagattccgccataaatgctttcttcgcattctcgctccgtactccgtcttctcgttccgttcggcatcgctaatttctctccgtcgaggtagaaaatagtacttccagggacttttaatgctagcttaagagtatgggcctttgattttactatgttgagatactttatgagaagtatagagtaaacagcagtttggtttagagggtgaaaagcttcacaaat

SEQ ID NO: 1787 - DNA, 272 bp, Glycine max
  unsure (1)..(272): unsure at all n locations; Clone ID: 700555575H1
ttcttcaatcaagcgaaggtngtctcacttgactcgattgcaagtgatccacgacacactgttcgcttcacaagcttcgaatccaattcctcagtaacatctgcanaagtcttctccttcaccatgccacncnaagcctttagactatgggtcaataaatgaaaacgtgaagaagagtcaatatgctgtcagaggtgaattataccttcgagcttctgagcttcagaaagagggcaaaaagattatattgactaatgttggcaacccacatg

SEQ ID NO: 1788 - DNA, 273 bp, Glycine max
  Clone ID: 700555576H1
gttgctccggcggggttcttcgacaagtacccggctctggtcaccggatttttcttcttcacgtggtacttctgaacgtgattttcaacatcctcaacaagaagatctacaattacttcccctatccatacttcgtatcggtaatccatttattcgtgggagtggcgtactgtttggtgagctgggccgtgggccttccaaagcgtgctcctatagactccaacctactgaagttgctcattccagtggctgtgtgtcatgcattaggccatg

SEQ ID NO: 1789 - DNA, 273 bp, Glycine max
  unsure (1)..(273): unsure at all n locations; Clone ID: 700555577H1
ggtcaatgccgacggtattatagagaaaacattcttgtggggtaggtactctttggaaatgtctgctgttatntacaaggattgggttttcaccgatcaagcattgcctaatgatcttgtcaagagaggagttgctgttaaggatccatctgctccccatggagttcgacttttgatcgaggactatccttatgcntctgatgggctagagatatgggatgctatcaagtcttgggtggaagaatatgtctcattctactacaagtcagatgg

SEQ ID NO: 1790 - DNA, 275 bp, Glycine max
  Clone ID: 700555578H1
gccttcctctctgcagagtgcagagctttctctccccgttgcttcattcattctcaacaacaaaccaatctttaaaatgagggggggcttgtggcaacttgggcaatcgatcactcgccgtcttgcccatggagataagaaggctgttgctcgtcgatgttttgcctcagaagctgagctgaaaaagacagtgtttcatgacttccatgttgctcatggtgggaagatggttccatttgctgggtggagcatgccaatccaatacaaggactcaa

SEQ ID NO: 1791 - DNA, 275 bp, Glycine max
  unsure (1)..(275): unsure at all n locations; Clone ID: 700555579H1
gtaatcaaggagatgaagattcaagacctgcctcagatgctttggatggacagaatgtgggtacagaggtagtgaaaaagccattctactatttgatcagggttcccagatatgatgatgatgaaaacataaaagagaagataaaaaacgctcttcaccaagtagaggagaagactaaaattcgagatgctattcgaatcgaaagccagactataaaggccagttgtaaggatttcgaccaagagttagggtgcaatagcagcccatagagtgnt

SEQ ID NO: 1792 - DNA, 273 bp, Glycine max
  unsure (1)..(273): unsure at all n locations; Clone ID: 700555580H1
cttgttggtcatgggttcgantccggaaacagcctctttgcatatgcaagggtaaggctgcgtataacatccttcccccataccttcgcatagcgaagagcctctgggcatggggtacgaagtttttatcaagcccagtagcatcttgtaatctatgtagctgaccttaccataatggtagatgctattgttgttgtgcatggtcagaagttttaagtcattaattgantggaatttgattttttacatctatttgcagatacatcttggcag

SEQ ID NO: 1793 - DNA, 253 bp, Glycine max
  unsure (1)..(253): unsure at all n locations; Clone ID: 700555581H1
attagcgttgccattctcatcctcctcngtntctctctctccaccaangccaggntccttacaagctccggccatccagcgccttcanttctcccttctggactacaaattctggtgctcctgtttggancaacanctcctctttaaccgttggagctagaggtccaattctgcttgangattannatcttgnggngaagctngcaaactttgacagggaacgtntcccagaacgtgttgtccatncnagggg

SEQ ID NO: 1794 - DNA, 269 bp, Glycine max
  unsure (1)..(269): unsure at all n locations; Clone ID: 700555582H1
cngatcccgacctcgacattgatagcagtggagaaatagtttatgcaatatgagctgcnggcagacaatgcaaactgacttctctgatnaatttatatatatagtatgccatgggttgttcaaagggtntngaatatctggaaggaaaagatttcacatctgaanggaangattctgtgaaaaagtntatgttgtgaggatcattnctgcttatagtcantggtcctttcatgantacatgctgctntgtattgatagtgtgtcattgt

SEQ ID NO: 1795 - DNA, 268 bp, Glycine max
  unsure (1)..(268): unsure at all n locations; Clone ID: 700555583H1
tcttctaacagagcaatgaaatttcacaatcgaaatctaggactagataagttctttcttctttcttcatgattgtntcgatgtattcaaaaatccgatagaanatttttggatagnacatttttatagtaatagtataaantgaaggttcttcacatttcacattattagtttcggactaaaaactaagtatcnattanaatcggaatatggtaaattggnttcttagaattcataaaggagattttatntttctaganttcnncna

SEQ ID NO: 1796 - DNA, 270 bp, Glycine max
  unsure (1)..(270): unsure at all n locations; Clone ID: 700555584H1
gatttggtttcacacacacagaagagnnaaaagagagagaagagaaacacacaaacacaaacagaagcatgnggtggaagtgatggttccaccggtggacttcaacttcgacagcaactgctcctcccccttcatcancgccccttccagcccccaattcttcgcttccaacaaaccaaacttcttcttcagcgcccccaccagccccacacgtggcacctcctccttctnccacgactccccctcctcttcctctgttcttccccatga

SEQ ID NO: 1797 - DNA, 271 bp, Glycine max
  Clone ID: 700555585H1
aacaaactaaccaattcaaagttcacacacacacacagcttgggaagaaaatcgagaattttccgagaaaatccgaagaaggcgggccatggtttccccggaaaacagcaattggctgttcgattacccgctgatcgacgacgttattcccgtcggcgacgcctccttttccgtctcgcctccgccttctcctggcccccacctcccgccaatgtcagtgttgaaattgatgcttcgcttggggattctgatggccccaaagatactgctt

SEQ ID NO: 1798 - DNA, 271 bp, Glycine max
  unsure (1)..(271): unsure at all n locations; Clone ID: 700555586H1
cacatattcaatggcttcctctcttctctctccatcattcacttcnttcccccgcataaagaaggatgtctctctctctgctttcacttctcagcgatgcttcaaagcgcttccaaggagaataatccgttgtgctgtggcggcgcctcagcgccaaccttccaccactggatcagtgaggactgcaatgaccatgactgagaagatactggccagagcttctgagaaggtacagctgacccctggcgataatgtttgggtcaatgttgat

SEQ ID NO: 1799 - DNA, 217 bp, Glycine max
  unsure (1)..(217): unsure at all n locations; Clone ID: 700555587H1
gagagagtattggcgcttcattcaagatgggtatttctagggattccatgcacagnggcgtgccactggtggcaagaaaaaggcttggaganagaagagaaagtntgagcttgggcgtcaggcagcaaacaccaagttatcaagcaacaagacaatcaggaggattcgtgttagaggtggcaatgttaaatggagggcttgaggctggatactngca

SEQ ID NO: 1800 - DNA, 272 bp, Glycine max
  unsure (1)..(272): unsure at all n locations; Clone ID: 700555588H1
gcagaatggngctttgctaataggtgcaaagcctcgaggacctggaatggaacgagcagacttgttagacatnaatgggcagatttatgcagcgcagggaagngctttaaatgccgttgcatcccgcaatgtcaaagttatagtagtgggaaacccttgcaatacaaatgcattaatatgcttgaagaatgctcctaacattcctgcaaaannttttcatgctttaactcgtttagatgagaacagagcaaaatgtcagctagccctcaagg

SEQ ID NO: 1801 - DNA, 270 bp, Glycine max
  unsure (1)..(270): unsure at all n locations; Clone ID: 700555589H1
gatccttcttcagaaatcaaaatccttcttcgttaaggaanacccagaagcagagggtacaccacatataatccaattttcatcgtcattgatgcacacttaccccacccttctcttttttcttagttcnnnnnnnnnnnnnnnnnnnnntgaaaccttaaattcctagctgtcttcaatatcgtaaaactcactctgcaatcatcgattttgttttcctgtgatttagggtttgattctgatcgaaacccgcgccatggccatgttcga

SEQ ID NO: 1802 - DNA, 269 bp, Glycine max
  Clone ID: 700555590H1
ctacgctctcccaaccgccagtctctgacccgaagagcgaaccataatggaagagtaaattaccggaaacgaataaccgtttctccgtgaaagcctccgccaaagagattgcctttgaccagcattcccgctctgctatgcaggccggcattgacaagctcgccgacgctgttgggctcactcttgggcccagagggaggaatgttgtgttggatgagtttggaagtcctaaagtggtcaacgatggtgtcaccattgctcgcgcaatc

SEQ ID NO: 1803 - DNA, 271 bp, Glycine max
  Clone ID: 700555591H1
ctctttttcttctctctcaacaacttcaccttcttcctcctcgatcatgtctcacttcaagggcaagtaccatgatgagcttatcgccaatgctgcgtacattggcactcctggaaagggtattcttgctgctgatgagtcaacagggacaattggcaagcgtttggccagcatcagtgtagagaacattgaatccaacaggcgagctcttagggagctgcttttcactgctcctggtgttcttcaatatctcagtggtgtcatcctcttt

SEQ ID NO: 1804 - DNA, 270 bp, Glycine max
  unsure (1)..(270): unsure at all n locations; Clone ID: 700555592H1
ctttcttcttcngcgtttttactttgacggtttctagagagagaaagtttgttatagagagagaaagcgcgnnnnnnnnnnnnnnnnnnnnnnnngacagtgagaagagagagagaagcgctcttctccgtaccgtttctagagagagaaactgatggccggagttaatccgaacggcgtcgcgattttccggcgactccaacgcacggcggacagttcattcagtacaacatattcggnaacctcttcgaggttacggcgaataccgtc

SEQ ID NO: 1805 - DNA, 274 bp, Glycine max
  Clone ID: 700555593H1
gtgcattaaattttccgagaggccaaaatatccattgcacctttctctttctccgatggctaatccctcactcttgttcttcagtctcctcctattatccgccaccgtagccgccgccgaacggatcgacgatgaagacgaccttctgatccgtcaagtggtgccggatgcggaggaccaccacctgctcaacgcggagcaccacttctccgccttcaagacaaagttcggcaagacctacgccacgcaggaggagcacgaccaccgcttccgt

SEQ ID NO: 1806 - DNA, 274 bp, Glycine max
  unsure (1)..(274): unsure at all n locations; Clone ID: 700555594H1
ggcacttcacttgttctgcattgaccatagcttctctctttctttcctaattaatcctnccacncaanaaaanacacngaatcatactcatagtcacacacacagcttagttncgtngtattntatgtgtccttnctcaattctcatcatatatctgtncaagtaccattatcnttcnatgttgagtgtcggcatttnttgagtttctcactaccacttgtacnanttntctgatacatgcatatatatacgtccagatatacagtctattcac

SEQ ID NO: 1807 - DNA, 272 bp, Glycine max
  unsure (1)..(272): unsure at all n locations; Clone ID: 700555595H1
cacaaccgaaacagtttccntctctctcacaaaatgacaacaatatcaaattgctcccttctcttcctcttctcttcctctccaccctccacatagcttccaccctctcaacccccaccaacttcatcaagtcctcctgcagcaccacccagtacccagccctctgcatccagtccctctccgtctacgctccaccatccagcaagacccccacgagctcgtccagacagccctctccctctccctcaacaaaccgaggcaacaaaacttgt

SEQ ID NO: 1808 - DNA, 274 bp, Glycine max
  Clone ID: 700555596H1
aatggctaatgctataacagggaagggtttggtgggcattggaggccagcaaaggggcaaattggtatttgcaaacaaccatagggcaaggcagtgccctcacatcctcattgaaattctcagcaatggctaatgctataactttgaagaagttgatcaggaaggggatacccccagttcttaggcctaagatttggttttccttgtcaggggcagccaagaaaaagtccaccgtgcctgacagttattatgatgatttgaccaaagcagtgga

SEQ ID NO: 1809 - DNA, 286 bp, Glycine max
  unsure (1)..(286): unsure at all n locations; Clone ID: 700555601H1
tttcaattttacacaaatattttcataanntcnaattatacttngatttgttttataaattctttctgcatttgcttcattatcgtaaatggatttataaaacaaatcanagtataattcgctttatttcaattttacacaaatattttcatactagaaatccgcttcacngaattcttgtgacatctcctttttgtcacaagcatatgtatnttttaatttattacacacccgaattattaacataaacactataagttaagatctgtntttcaatatcatggaa

SEQ ID NO: 1810 - DNA, 283 bp, Glycine max
  unsure (1)..(283): unsure at all n locations; Clone ID: 700555602H1
atagttttaaaattaaccatcgatttagttgcaactggaacacaggtttctttcaatgaaataatattaatatcaatttaataagcnggtaatgtaaaatactgctaatgttaatatgaagtttggatggtcttattggcagaagatgctaggtggtgttcatcaatattctgaaaggtaaaacgattttggtttttaatgataatataaccatgaatctaacatcagatattgaacgctacacatcaaaataaatcgagccaacgcatttaattgtaagtgt

SEQ ID NO: 1811 - DNA, 275 bp, Glycine max
  unsure (1)..(275): unsure at all n locations; Clone ID: 700555603H1
ttnccggttcaaaccaattttctgaattcatcatngacttcgagattcgganttttcttcaacggcctcgcatgagcatgcaagtnaagaagcaaaggtatctgatcagtctgaacaagctgaagctgcggatcaaaccaaagaatcagatgtagagagtgaatgtgatctgtccagggatgatttgataaagcttgttgctgagaaggaacaacttttgaagttgaagcacaaggagatgagaaaatgcaggataaagttctgcgaacttatgc

SEQ ID NO: 1812 - DNA, 279 bp, Glycine max
  Clone ID: 700555604H1
agcctctcttctgatccatcttcaaaagacactgagaagggaattcaacgctttactcaaagctttgtacctggagtgcacctcttcacatatgatgaacttgaagaggccacaaattactttgactcatctaaagaactaggagaagggggctttggaacagtgtattttggcaaactgcgggatgggcgttctgttgcagtgaagaggttgtatgagaacaactttaagagagttgcacagttatgaatgaaattaaaatcctagcaaatttggatc

SEQ ID NO: 1813 - DNA, 280 bp, Glycine max
  Clone ID: 700555605H1
cgcttgcgaaatatccccaacgaaattttaatctcatcgcgattccgcaaaagaaaagaaaagagtgtgtggtgtcggggatgaacatacattgaggcaaaagtgtttcttttcttttcttttcttttctgcgcagttattattattttaggactgcaactgcatgagttggacaaaaccgagcaagattggtagcttgaagttctacaagcttcagcaactatggctattgctacggccaccctctctctccatttcgccaaaattcccattcgtcaaa

SEQ ID NO: 1814 - DNA, 279 bp, Glycine max
  unsure (1)..(279): unsure at all n locations; Clone ID: 700555606H1
gcacaaggttatcgcattctgcttttgctgcttcttcgttcaaccctttctgagcccgtgcatcggcatgggcttctcgctagtttcaaattcaaattcaaaagcctaggctacggttcgtctaggttccaggctatgccgattttgtagtctgagttgattgattcacatcaccgagctattgtcacagacacaagnntatgaaacattgttcaatatcttttgatttccgacaaatgtgagtagcttctgatttcacctcatttatgcattcctttt

SEQ ID NO: 1815 - DNA, 278 bp, Glycine max
  unsure (1)..(278): unsure at all n locations; Clone ID: 700555607H1
gcaatgcaccggcactgcccgagactcttaagaattacaacaagctggtgtctcttggcttcaagattatattcttgtcaggaagaacactggacaaacaggccgtaacagaagcaaacttaaataaggctggctaccacacatgggaaaaattaattctcaaggatccacaagatcctttccactccaaatgcagtttcatacaaaacagcagcgagagagaaactgtaagggcagggatacaacntgttggggatcatggagaccattggacgact

SEQ ID NO: 1816 - DNA, 280 bp, Glycine max
  Clone ID: 700555608H1
gattggttcaaattgaagataccctttccatttctctctcgtttctcgtcttcgtagcttgatcaggttttccgattcgtccggcgatctctctctccattcgcgatcgatcaccggttgtaggttttggggcacagagaccgaggtcgccgccatgtcaatgtcggattccgattcctcctcctcctcttatggcgctgaatacaagagtctcaaacaagttagccgcgaccgattattacatgaaatgcttaggtcagcgaaaacaggagattcaaaa

SEQ ID NO: 1817 - DNA, 278 bp, Glycine max
  unsure (1)..(278): unsure at all n locations; Clone ID: 700555610H1
atnannaatngcaanttcanggagacanatagaatacacgataacggaancattgagntcatctncccttttatntntnggntannagagatgatatggnntagcattagcttctgccaatgangaagacaccagcccccagtttgnctcagtctaaccnaaganaaangattgttggattccaagntagaggtgcagccaanggnacacagagtcacagtgttcagaaccattctgctctgactatttcaagtcttccttcaagaantnttnnacat

SEQ ID NO: 1818 - DNA, 275 bp, Glycine max
  Clone ID: 700555611H1
tgttaatcattgtctttattgtcttactatatgatgttggccaggattttttatctgacatacatgggcagaaattgtttctcactcttcataatgatggtaaactagccagcttcgaggattcatcaggtaaagtatatgattttgtaagctattctgctccggagccagacgaaacagtttttgttccctctacagaaccaaaaataggtatgcatctataggtattattttttgtttaatcttctctattactattatatttatataaagaa

SEQ ID NO: 1819 - DNA, 277 bp, Glycine max
  unsure (1)..(277): unsure at all n locations; Clone ID: 700555612H1
caagttcttgggaagtaccacgctgtacagcgtagaaaccagatttgcgctgcaggcggagtatagaatcaaaatgggagggcaagaaatatcaccactaaacgacaccggtttgttcaggaantgggccggtgacgaagaagattatttaatcaaacaaaatccacagaataatgatctttcaagcaacacggatggtaagatgaacataaccgtgaatcctgattacgtggcacccaaggactctacagaacagcgcgtaacatgggcacaaacg

SEQ ID NO: 1820 - DNA, 276 bp, Glycine max
  Clone ID: 700555613H1
gagccctgcttattctgctagaaagcaatcattggatcatgaaggcaaacttcacatgcctcatccatggcctgtaatgccctctagtctgtcactgagcatcttggactctaatacaaaaggtccgcacatggtggtgatacaacttacaaagctcgagggaatttgaggtacagtgcatttggtgaataccctgcactgcatggtcataaagttgagcattcacatggaaacttgatgcacccccacctgcactcctaactcaatatcagagtc

SEQ ID NO: 1821 - DNA, 278 bp, Glycine max
  Clone ID: 700555614H1
ctttatttatgtgccaaatgggataggaaccatattgggattgatacagttgatattatacttctatttcgagggtaaatctagagtgaactccagagaacctttgatagtgtcatatgcatgatcagttctgctgaaaagactggagaatcagagttagaaatgaccttttgctgctagatgtggtctgaaactggagttggcaacatccctgtctgtttgattcaatttataggagagcaataccgttgcatctttgagagagaccagaagttgtg

SEQ ID NO: 1822 - DNA, 278 bp, Glycine max
  Clone ID: 700555615H1
caacctggtcttactgtgtggtgactgtgctctgctctcatctcattcatattcatttcaatggcaactcaaggtcaagtcattacctgcaaagctgcggtggcctgggaacccaacaagcccttaaccgtccaagacgttcaggttgctccgcctcaggccggcgaggtccgtgtccaaatcctcttcaccgctctctgccacaccgatgcttacacttggggcggcaaggatcccgaagtctttcccctgtattctcggccacgaagctgcaggga

SEQ ID NO: 1823 - DNA, 273 bp, Glycine max
  unsure (1)..(273): unsure at all n locations; Clone ID: 700555616H1
ttacattttccttctagaaaaggccatgcatgatattggccatgaggatgacttggtgatagagcttgccaatgaagtgaagaaagtacttggagtgggaaatgtagtaccaaaggagaagaaacaggttggagcagcacaacttccacaccctcctcatgtgccaatccctaccctnncaacngctcccgctgccagaacctattgctttggatagctgacgcggaaactgacgctgattcggcaactaaactgatttactgcggaccctac

SEQ ID NO: 1824 - DNA, 280 bp, Glycine max
  Clone ID: 700555617H1
tccaaagcactttttattggcttctctctgcgatggccgtggatttctccaaagcggtcgacgacgggctgaagctctccaagcgcatatacttcgtgaaggacagggcggtgtccccgcccaagcctccgccgccgatggcgcgctgggccaccgcgttcctcccctcggcgccgatggtctacgcggtgatctccgatccagggatcgtggacaaccccgacatctcgagctaccaaccgcacggtacggaaggtgtgatcctccagcgctgattccg

SEQ ID NO: 1825 - DNA, 273 bp, Glycine max
  unsure (1)..(273): unsure at all n locations; Clone ID: 700555618H1
ccgcaaccctgacactttgaagaaacttaatgaagctgaaaaggcgaagacagaactagaacagcaagaatattttgatccaaagttgcgctgatgatgagagagaaaaaggaaatgaattcttcaagcagcagaagtatcctgatgctgtgaagcattacacagagtctatacgaagaaatccaaaagatcctagggcttatagtaacagagcagcatgctacactaaattgggggcatgcctgaagggttaaaggatncagagaagtgcat

SEQ ID NO: 1826 - DNA, 279 bp, Glycine max
  unsure (1)..(279): unsure at all n locations; Clone ID: 700555619H1
gtctacctctacaaaggaagaagatattaatagcttccctagccggagaccgtctccatcactttctgatgcaacacttttgagggacagaaacagcctatcaaatcaagcaacagccagcgttcctcttggttctggaaacatggtttctagcaatgtggcccttggatcagtctcttcagcctctgaaatagctaaaaggaacataatgggagctgatgatacgnttggaagtagtgggatgggtagcctcttgtatccccgctaagtaatagattg

SEQ ID NO: 1827 - DNA, 276 bp, Glycine max
  unsure (1)..(276): unsure at all n locations; Clone ID: 700555620H1
tattttctcaattacaacatcgtattctgcaaattcaaaccgggtcttggttttctgaaagatgggaggtggcaaggacaagcatcatgatnaatctgacaaaggaattttttcacaccttgctcatggggtagctggtgcagcacatggtggacatgggtacccacctggggctcacccaccaccacctggggcataccctccacaacaaggatatcctccagctgggtatcctccacaacagggtatcctccagctgggtaccctccacatcaa

SEQ ID NO: 1828 - DNA, 275 bp, Glycine max
  Clone ID: 700555621H1
agagagagagatggggctaagaagtaaattaagaatgtcagcgtcagtggtgcagcaggggatgaaggaaataagaaggagcgtgacgtacatgcctcgaccgggggacggtgcgccgcggggggtgacgctgataccgggggacggaattgggcctctggtgactcatgcggtggagcaggtgatggaggcgatgcacgcccccatatacttcgagaagtacgatgtgcacggggacatgaggcgtgtgccggaggaggtgctggattcgatac

SEQ ID NO: 1829 - DNA, 247 bp, Glycine max
  unsure (1)..(247): unsure at all n locations; Clone ID: 700555622H1
ctctttctttctgctttgtccaataactcagaacatgcccacttggtngggtaaaaagtccagcaagagcaaggaccaacaaccgcaagaagaccaccaccacccccctcatggcggaggaggaggcgccgccaccagtgtccttaacttcaatttcaacaagctcaacaagcccaggcccgacaggccctccaagngcttcgacgacgtcgtcagaaactcccctcgctgcagccgcgatttagtt

SEQ ID NO: 1830 - DNA, 257 bp, Glycine max
  unsure (1)..(257): unsure at all n locations; Clone ID: 700555623H1
gttcatttctacacatccctagctcngtcgttccgtcgttgacactggcnnttcgggtgcgaancctgacctccgctctctctttcttctctctctcttgtccatcgcttccgccaatgtcttcttcgaagagcgtttcgatgacgggtgggaaaatcgatgggttaaatcagattggaaaaaagatgagaacgtggctggggagtggaaccacacctctggtaatggaatggagacgctaatgacaaaggtattca

SEQ ID NO: 1831 - DNA, 274 bp, Glycine max
  Clone ID: 700555624H1
aaaccctgaagaaagacacagccattgtttgtttactttccattgattgagcgaaagtttgttttttctgcgatcattttccattgggtggaagaaagtctcaacctttagtcgaaagagcaaggatctgagtgagtgagcgatcatgtgtggtggtgcgattatctccgacttcattccagcgggtcccgccggcggggcgcacgcgtgaccgccgacatcctgtggccgaatttgaggagcggttctcgaagtcgctgctggacgatgattt

SEQ ID NO: 1832 - DNA, 273 bp, Glycine max
  Clone ID: 700555625H1
tgactgtttagacccttttaggagtggtgttcttatattcatcggtggttgtaataaaagtcttgaggccctggatgatatgtattacctatatacagggattgcacgggaaagtgaacagagaccagaaaaattatctttaaagaagcaattgaaactgaaatgcctagaacaaaatcccaatcctagccaaaatcaagttctcgttagatatggagtgggttctgatgtgggacagacatgacagtgttgaattatagccaatcaagtaga

SEQ ID NO: 1833 - DNA, 272 bp, Glycine max
  unsure (1)..(272): unsure at all n locations; Clone ID: 700555627H1
gaatattgaggggatgcctttagtgcaattngttggagatgatctgtttactagtgccactcatagaacccttggtggggccattattgtttcatccattttacgttgggagagtgttgtgataggttgtgtagatgatgaggggcacttgccgtgtgaaaatggctcgttcttgagttctaaggaaaatgctctcttattgagtgataatggatatcctcaactaagaactgttttcgggtgcataagaacgagaaacatctattgaatgg

SEQ ID NO: 1834 - DNA, 274 bp, Glycine max
  Clone ID: 700555628H1
agtgaattgaaattgaagtgactcggggtgagttgactcagcaatggcggaagaggtgactcgggtgatggtggcggtgaacgagtcgagcattaagggataccctcatccttcgatcagcagcaaaggggctttcgactggaccatcaacaagatcgttcgcgacaacgtctctgccttcaaccttctttttcttcacgttcaagtccccgatgaagatggttttgatgacatggatagatctttgcttctcctgacgattttaagaacatga

SEQ ID NO: 1835 - DNA, 274 bp, Glycine max
  Clone ID: 700555629H1
agcggactgcttcaactcctacaactgccaattactgtcccgacgaaatacaatctgattcagctctggttccagcatcttcctcacaggttactgaagatgataagcctctaccagttatttcgagaactccgaggaagcaatatccaacattataacccctggtgatattcatagtgacgaatgtgatgctcctgatgcacaatatcaaattgttgaaccagttgcagaggaggatcactgttgagcgtggacatattttatgacccaacaa

SEQ ID NO: 1836 - DNA, 274 bp, Glycine max
  Clone ID: 700555630H1
gagaactgtgactgcttgcaggggttccaaatttgtcactcactgggaggaggaactgggtctggaatgggtaccttgcttatctcaaagatcagagaagagtatccggataggatgatgttgacattctcagtgttcccgtctccaaaggtctctgacaccgtggttgaaccctacaatgccactctctctgttcatcaactagttgagaatgcggatgaatgcatggtccttgataacgggcactctatgatatctgtttccgtacactcaa

SEQ ID NO: 1837 - DNA, 266 bp, Glycine max
  unsure (1)..(266): unsure at all n locations; Clone ID: 700555631H1
caagctagcatttactggctcaacagataccggaaaagttgtactcnaactngctgnaagaagcaatcttaagccagtgacattggagcttggagggaaatcgcctttcataatatgtgaggatgctgatgttgacaaggctgttgaactgcacactttgctctgttctttaatcaggggcaatgttgctgtgccggctcacgtacctttgtacatgagcgtgtctatgatggttcttggagaaatcaaagaaacgggctttgaga

SEQ ID NO: 1838 - DNA, 133 bp, Glycine max
  unsure (1)..(133): unsure at all n locations; Clone ID: 700555632H1
aaaatttgtaatccgagtccctccagcagcatgccaggtctcgtatcggacgcccaacccctcggaatctccgtcccggacacacccaggcagtcccagagaaccccttctccactcnccaaaaaaccaccca

SEQ ID NO: 1839 - DNA, 280 bp, Glycine max
  unsure (1)..(280): unsure at all n locations; Clone ID: 700555633H1
ctatcccatggtcccaggacatgaagtggttggtgaggtactganaggtggggtcagacgttagcaggttcagagtgggaganttggtgggagttggactcctcgtaggttgctgcaaaaactgccgccatgccaacaagacattgagaattactgcatcaagaagatctggtcttacaatgatgtttatgtcgatggaaaacccacgcagggtggctttgctgaaancatggtcgttgagcaaagtttgtggtganaattccagagggtttggcgccag

SEQ ID NO: 1840 - DNA, 278 bp, Glycine max
  unsure (1)..(278): unsure at all n locations; Clone ID: 700555634H1
accttagtaacattgccacatattgtgttcattttggaattgtgccactaaaattctattcaattcatctatggctgcctcttcttangctatgcnatcaatcctggcnaaccctttgatccgcatttccagcgggtctanggtgaaccaatttggcgttcntgctttgcanatgagacaggaatgttggcctgngagttaggtccatggctanggaagaacaaccaagtgngcctgcaacccagttacaccgccaccatcagtagaanccaagccac

SEQ ID NO: 1841 - DNA, 121 bp, Glycine max
  Clone ID: 700555636H1
caactgtttagttaaggggtgtttatctcttgtagagcttttagtttgatttagagttttcttgttgaaatctggttaagtttgtatcaatataattggcttatcattcgctttctgctgt

SEQ ID NO: 1842 - DNA, 275 bp, Glycine max
  Clone ID: 700555637H1
ccggtctccaacccctaatttcctcccaaacttcgtgtctcacaccatcacacgctttccctctctcttctactctatataaacacactcacacaccactcttccacatctcactttccaatttccctcatggagtttcaaaaacctctatggctattcttgcttctcctcactctcctctcaagctcccaagccaacaaattcaacgttggtggaagcaaagggtgggttccaaacccttcgagagttacaacaattgggctggaagaaaccga

SEQ ID NO: 1843 - DNA, 274 bp, Glycine max
  unsure (1)..(274): unsure at all n locations; Clone ID: 700555639H1
ccttctcttccaaatcctgtgatcccattccaatccgttccgttcagctcaatctcaaaatctcaatggccgataatgagcaaccgaataacgaggaggcaagtcctcttctccaccagcncctcccnnnnccnnatccgaaccaccaacgccacctgagactcccgagtttctcctcggctggaccgctgatgggctccctctngcccacgccagcgtcgtgggccagcccatgggncggcnccttggaactcntcnatctgcgnntgtntcg

SEQ ID NO: 1844 - DNA, 272 bp, Glycine max
  unsure (1)..(272): unsure at all n locations; Clone ID: 700555641H1
gangnagangagcgtttcacatttcgcggttctgtcgtcgtgtngtngnccacgcttggccccttctactgtngcgngcttcaacccttcgttctcgcatccggtgtngtactantctcactgtacttcttcagagactcccactccaacctncggnagaaacgagtagtgtcgggggttcagcccacgggctcaattcacctcggaaacnattttggcgccatcaagaantgggntgccttnagaatgtgtanganacacnngncntnatt

SEQ ID NO: 1845 - DNA, 271 bp, Glycine max
  Clone ID: 700555642H1
ttcattttattttaatccttttcaatgaaagtcattgcggagtgatagaagagcgagattcacttggaaatcttctgaagagcttccgagtttgcgaatgagagaactcggcattgactcagagacggttcgttatattttcgtggccgatggtttatgctagattgaaataaatttgcattgactatgggtgtctctgggaagtggattaaagcattggttggtctaaagaaatcaaaaagccagggtcttctgagaaggatggaaatgt

SEQ ID NO: 1846 - DNA, 270 bp, Glycine max
  unsure (1)..(270): unsure at all n locations; Clone ID: 700555643H1
gtgacttgtgtgccaaattaatagaacctcctctattctattctgtctaattttctaacaataacaccttgacctagagcntgtggtatgatggtatcaatatcaagaagggttggagccgtacccttaaatttgatgaagcgtgtgattcactgtttaattttggagtgccttcgatagctctcaaatgtgcctgtggcttgtagttgtgggcgtggcattagcatttgcatgtaccattattgaagcaagcgcaaggtccttaccctt

SEQ ID NO: 1847 - DNA, 273 bp, Glycine max
  Clone ID: 700555644H1
cagaggattcgctccaacccctatcgagtaaggtattatctgtcaatttacattcgaaagggttaggctattgaattttaaataattacagataaaataatcgatagctttgattttaaaaattaatcataatcatcggttaggttgcaacataatacttaattcgcttaattttttaactgcgcctcagagtattcataacatattctattaaattaataagctggtgatgtaattaatattaatatgtagttttggcaatcttattggcag

SEQ ID NO: 1848 - DNA, 272 bp, Glycine max
  unsure (1)..(272): unsure at all n locations; Clone ID: 700555645H1
ctacgcttcacttttccgtaataaacccttcaaaagcgaaaggntttctcgtttttggaccttatctctctttctaaggttcgattctgcgtactttgggaggaacagacacacatgaaggattcgaattcggatctgtttgacccggtcatggcgatggagtccgagtggtctcgcggcggcaccacctccgatgccgatttcgccttcgccttcaacgacagcaacttctccgacaggttctccggatcgagatcatgcacgaccccgtc

SEQ ID NO: 1849 - DNA, 274 bp, Glycine max
  unsure (1)..(274): unsure at all n locations; Clone ID: 700555647H1
agctgatgtgccatttataagttgttctgctagtgagtttgtagagttatatgttggtatgggtgcttcccgtgtgaganatctctttgcaagggcaaagaaagaagcaccatccataatatttattgatgagatagatgctgtggctaaaagtcgtgatggtaaatttcgcattgtcagcaatgatgaacgggaacaaaccttgaaccagctgctcactgagatggatggttttnacacagttctgctgtcattgttcttggagcaactaatc

SEQ ID NO: 1850 - DNA, 173 bp, Glycine max
  unsure (1)..(173): unsure at all n locations; Clone ID: 700555648H1
cacctcgtagtctccgcagttggggtttagagacaactgcaactccgttaataacaacacaacactcaaaacccaaaacactttatactttcttcacttcgaactcgcncttcgtttccctctctatctctccgccacgcgccaccatgtcagtctctantccgtcnagnttg

SEQ ID NO: 1851 - DNA, 276 bp, Glycine max
  Clone ID: 700555649H1
caacaacaatcctacgagcaccatcacagtcataataacttgcttttcaagccccaacaaggttttggattccttgggacaaccactggccccgaatcctggggaaattgtgagtaaataccctttttgtctatcaatttgtaagcatcgatcactccaaaatttacaatatatttaccgtaatccttaattttgcaagagttcatttttttaagaataagaaatgttagtagcacattctttaacacacttttttaaaatacaattagaaattac

SEQ ID NO: 1852 - DNA, 270 bp, Glycine max
  unsure (1)..(270): unsure at all n locations; Clone ID: 700555652H1
gtgcctccgaagattgctccgataactctcagcgaccggactcacacaaggaccagcgagtctatttcgttccacacaanatacgacangntnctcaggantcaatgccggcggattaggataagaagaagggattgcgttcgcnncttttntcggttcgncctatgctggtcctatgaagattatcaataacatctttaactcagatctngtgtccagtcntcggagggaggacgantgcagcacantcgtgaaaatgncgaattggtg

SEQ ID NO: 1853 - DNA, 205 bp, Glycine max
  Clone ID: 700555653H1
tagtgcctccttgccagaagttaaaatggcccaagaaactttcctattcacatctgaatcagtgaacgaggggcaccctgacaagctctgtgaccagatctccgatgctgtgctcgatgcatgcttggagcaggaccctgacagcaaggttgcctgtgaaacctgcaccaagccaacatggtgatggttttcggagagatcacaa

SEQ ID NO: 1854 - DNA, 271 bp, Glycine max
  unsure (1)..(271): unsure at all n locations; Clone ID: 700555654H1
gttgaagcagttgttcatgcctgtnaacttgctgctgagtggcgccagactttccactctgatgtggttgtccgacttggtgtgttaccgtcgatttggccataatgagattgatgaaccatctttcactcagcctaaaatgtacaaggtaatccgaagccatccatcaactcttgagatctatgagaagaagcttttggaatcaggggagttgacacaagaagaaattgataggaacacaagaaggtcacatcaattctaaatgaagaat

SEQ ID NO: 1855 - DNA, 270 bp, Glycine max; identical to SEQ ID NO: 1846
  unsure (1)..(270): unsure at all n locations; Clone ID: 700555655H1

SEQ ID NO: 1856 - DNA, 272 bp, Glycine max
  unsure (1)..(272): unsure at all n locations; Clone ID: 700555656H1
ccactcgggacaagcatctgctanaatgtcatgaggttgaaagaacttatgangtgaaggttttgaatcacaatgctgctcttcaactgcttacttggaatgcttttaaaagagagaaaattgatccaagttatgaggacgtcttgaatcgtgtagtaacttatgcttctggccttccattggctttggaaatcataggttccaatatgtttggaaaanntgtagcnggatnngaatcgcggtggaacattataaaagaattcccaacgatg

SEQ ID NO: 1857 - DNA, 270 bp, Glycine max
  Clone ID: 700555657H1
agaattcccagactgcaatgcacaacactaactttggtgcgtccataccctctactgcatttggagcaactgtggcaggacaggggatacgtgctggacaacctgatcaacaaccaaagaactcagtgttctcaaatgcactctctagtcctattcgacgcagccttcagccatatcatttggcacaggggagctttccttcatgtaatatcatgtcttcaggaaatggaacccggaatagtgacatgacttatcctaatggccagaaca

SEQ ID NO: 1858 - DNA, 269 bp, Glycine max
  unsure (1)..(269): unsure at all n locations; Clone ID: 700555658H1
tgactgtttagacccttttaggagtggtgttcttatattcatcggtggttgtaataaaagtcttgaggccctggatgatatgtattacctatatacagggattgcacgggaaagtgaacagagaccagaaaaattatctttanagaagcaattgaaactgaaatgcctagaacaaaatcccaatcctagccaaaatcaagttctcgttagatntggagtgggttctgatgtgggacgatcatgacagtgttgaattatagccaatcaag

SEQ ID NO: 1859 - DNA, 272 bp, Glycine max
  Clone ID: 700555659H1
atttggtttcacacacacagaagaagcaaaaagagagagaagagaaacacacaaacacaaacagaagcatggaggtggaagtgatggttccaccggtggacttcaacttcgacagcaactgctcctcccccttcatcaccgccccttccagcccccaattcttcgcttccaacaaaccaaacttcttcttcagcgcccccaccagccccacacgtggcacctcctccttcttccacgatccccctcctcttcctctgttcttccccatgaag

SEQ ID NO: 1860 - DNA, 270 bp, Glycine max
  Clone ID: 700555661H1
agtcggtgtaatttacatttatccattttttgaaccttcccttcccaccccagaactttcaaatttcaacaaaatcgcagacatggcttctgcggtgcccgcgacggggcgagagttgtcgaatcctccattggacggcatcaccaatcttcgattctccaatcacagcgatcatctccttgtgtcctcatgggacaagagcgtgaggttgtatgatgccagtgccaatgtcttgaaggagagtttatgcacgctggtcccgtcctcgat

SEQ ID NO: 1861 - DNA, 274 bp, Glycine max
  unsure (1)..(274): unsure at all n locations; Clone ID: 700555662H1
cctatcttctctcttgtcttgattccattcaatttaaacctccagggcgtggcaagtttcaacctttttcgagcacccattaacattaacatggccattccctacccccatttcatcgccacgagaaagccgccatggacgccggcctcctccacccctnctccccctcctccgtcatcctcacccaagacgacctcaagaaaatcgccgcctacaaggccgtcgagtacgtcgagtccggcatggtcctcggcctcggcaccggctccactgc

SEQ ID NO: 1862 - DNA, 273 bp, Glycine max
  Clone ID: 700555663H1
ctcagatcaaaattgcggagtggaatcccgagaaggacttgctcgccatggtgactgacgattctaagatcttgctccatcgtttcaattggcaacgcttgtggaccattactccaggcagatgcataacatctttgtgttggcgtcctgatggaaaagcaattgctgttgggcttgatgacgggacattgtcactgcatgatgttgagaatggaaagctattaagaagcttaaaatcacattgcgctgccattatatgtctcaactgggagg

SEQ ID NO: 1863 - DNA, 274 bp, Glycine max
  unsure (1)..(274): unsure at all n locations; Clone ID: 700555664H1
gctattcttacctcttggcatgaccattcaaatgtcttcttttctcttagcttctcttgctgttttctttttcttctcctccttggagaagagttttgcctttcaagcagcaagaaaggaggacacagaaagcaacaatcttcatcaatatactcatcttgttcacctcagctcactccttccttcatcttcttgcagctcttctaccaaaggtnncaaaacaaaagcatcattagaagggtacacaaacatgggccatgctcccaactaaatg

SEQ ID NO: 1864 - DNA, 272 bp, Glycine max
  Clone ID: 700555665H1
cttgcgtttcatgtgttgggaaaattgtgaaaggtgacgtggaccagtcagatggtagcttccttgatgatgaacaaatagaaagtggatgggttctcacctgtgttgctctacctagtcagacgttgtcattgagacacacaaggatggagagatcgaatgatcgatatatatcataatgtaatcttgtccattgctcttctaatgccatctatctatgtcgtgttttgattttgttagagtgatttggcattggctagttagctagctgg

SEQ ID NO: 1865 - DNA, 156 bp, Glycine max
  unsure (1)..(156): unsure at all n locations; Clone ID: 700555666H1
caattttngtntttntntttcaatttttaatctccnanccctttttttaattttggaatcgaaatatntaatctaaataatccaaaaattcactcttaatcttgacagtgatatacgtggtatatgtaaatcctagangtaaaaataggcggnctt

SEQ ID NO: 1866 - DNA, 269 bp, Glycine max
  Clone ID: 700555667H1
aatggttatcgttttgaagaagcttttgatggcagtgctctgagactgaatcattgaaactagattcaatttattcgctcctttcttcaccaaaattgaattgaatggatgctatcagaaagcaagcctccaagcttcgagaacaggtcgctcgccagcagcaggctgttctgaagcagtttgggggtggcggttatggaggttcagataatgtggttactgatggagtggagcccagctacaccagaaacttgagaaactttatatat

SEQ ID NO: 1867 - DNA, 270 bp, Glycine max
  Clone ID: 700555668H1
gtttcttacaaggctctactctactgcttcaccttctgctctagaaaattcagtggtgatacatggcttcggctactctctctgtagccaaaccagcccttcaggcaaatgggaaaggcttctctgaattctctggcctccgcagctcatcaggcttccttcccttttctagaaaatcttcagaggatttccattctgtcattgccttccagacctatgcagttggaagcagtggaggatacaagaagggtgtgacagaagcaaaactga

SEQ ID NO: 1868 - DNA, 267 bp, Glycine max
  Clone ID: 700555669H1
ggcaattgtgaatcccaaggaatgaaggatttcatgaatgagagcaagctgaatgatctcttgaacagctctgattatgtcccaacctatgaggacaaggatggtgactggatgctgtcggtgatgtcccatgggagatgtttgttgaatcatgcaagcgtttacgcatcatgaaaggaaaggaggctattggtcttggtcttgcaccaagagccatggcaaaatgcaagaacggagctagactagtcgcacaattcatgacctgcc

SEQ ID NO: 1869 - DNA, 267 bp, Glycine max
  Clone ID: 700555670H1
ggtgcaatgattggcgttactctatggcaataactgtttgctgaatttgaggcaaagttgcattgtggttctgcatatttgattcagaacattaaagttgttgacaatcattctacatacaaaacaaatatcccttcaatgtccaaaatatcaagcatgggtcaaagttgtatgtcaacattgatatagcaaaaatccaagaattccataataggtacaatgcatatatttttggaacactcaaatttgaccttcatcttttgttgc

SEQ ID NO: 1870 - DNA, 267 bp, Glycine max
  Clone ID: 700555671H1
gaacgaagcctcctcgttcttcttcttctgcgctttctctctccctctctagaaccgtaaccgtcgtttctttctttctcactcctcaaccagagataaagagtcaccttcttatttttctgaatctcgcggcgttgttctttctgctgctgcggctgtggttccggcggcgatgggacagcaatcgttgatctacagcttcgtcgctcgaggcaccgttatcctcgcggagtacaccgagttcaccggaaacttcaccggcgtggc

SEQ ID NO: 1871 - DNA, 268 bp, Glycine max
  Clone ID: 700555672H1
cacttttcagttacaaagcatttcattgttttacaatatacaacactacaatggctgcttcaacaatggctctctcttcatcatcattggctggccaagctatcaagcttgccccctccacccctcagcttggtgttggaagggttagcatgagaaaaacagcctccaagactgtttcctcaggaagcccatggtacggcccagatcgtgtcaagtacttgggcccattctctggtgagcccccatcctacctcactggtgaattccc

SEQ ID NO: 1872 - DNA, 268 bp, Glycine max
  unsure (1)..(268): unsure at all n locations; Clone ID: 700555673H1
cacaaaacactatagcaatagaaacatttgcttttgaaaaacccctcactcttcatcactacactagctancccacatacaatgtcgaccaaatttaaggtgtttcgtgaattcacaagcgatgactcattcctaaaccaagttatccctgaaaacatcaccgaattccaagtgactctgtccctcnctagagactacgatggcaacaactcaaccaacggaaagttcattccttatgggacactgaaaaggtcatcccgaagtgata

SEQ ID NO: 1873 - DNA, 269 bp, Glycine max
  Clone ID: 700555674H1
agcaaccatggcaatggcaacccaagcctctctcttaaccccacccctctccggtctcaaagccagcgaccgcgcctccgtgccatggaagcaaaactccagcctctccttctccagcccgaagcccctcaagttctccagaacaatcagagcagcagccgccgacgagaccacagaggcaccagcaaaagtagaggctgcaccggtcgggttcaccccaccagaacttgacccaaacaccccttccccgatcttcgggggcagcaccg

SEQ ID NO: 1874 - DNA, 258 bp, Glycine max
  unsure (1)..(258): unsure at all n locations; Clone ID: 700555675H1
ttcgtacacaggatgctgccgcgtggcttgaatatnttgaatcaaaagccatngagcagcaagaagcaactaaaaatggaactccaaagcctgatgcatccattgcaagtaaaggtcaccttagcgtgtcagatctcctggattttattagtcccaacccaaaaggaaatgatgctcggaggaaacagaggcgtacaaagatactctcaacaagtgataacaacatcaagaacatgatgaagcaatagctgatgagac

SEQ ID NO: 1875 - DNA, 266 bp, Glycine max
  Clone ID: 700555676H1
atcgtgttcaagaacaacgcaggtttcccccacaacgttgtgttcgacgaggacgagattcctagcggcgtggatgcagggaaaatctccatgagcgatgaagaccttctcaatgcgcctggtgagacttacagcgttactttggatgctaagggaacctacagtttcttctgttcgcctcaccaaggagctggtatggtgggaaaagtcactgttaattaattattgtctcagggctcgtctcctacgtctaagttctcatatgg

SEQ ID NO: 1876 - DNA, 269 bp, Glycine max
  Clone ID: 700555677H1
ctcgcagtggagagagagtgttagcaccaaaaatgtcgaagttaatcttcgtgttccttgcactaattcctcttctctgcacctccttctcgccagagaaaccctcagatcggcgcatcctcgttttgctcgatgacttcgccatcaaatcctctcactctctcttcttcaactccctcaaatctcgcggcttcgatctccaattccacctcgccgacgaccccaaaattgcgctccagagatacggccagtacctctacgacgcccta

SEQ ID NO: 1877 - DNA, 268 bp, Glycine max
  Clone ID: 700555678H1
caaagcacaaagcaaagctcatccttgagttaaaaaatggcagcagcttcttccatggctctctcatccccatccttggctggcaaggccgtgaagctgggcccatcagccccagaagtgggaagggtgagcatgaggaagaccgtcaccaagcaggtctcctcaggaagcccatggtacggcccagaccgagtcaagtacttgggcccattctctggcgagcccccgtcctactaaccggtgagttcccaggcgactacggctggga

SEQ ID NO: 1878 - DNA, 266 bp, Glycine max
  unsure (1)..(266): unsure at all n locations; Clone ID: 700555679H1
caancgcataaaaaacanaganacagtgtnctnagcgccgccgtngncctancatcttcatattantctattgnctttctttcacgtttttctggtttntaagcccttccagtgccctatttacgcttatacccttctggttatgatagctccattcggngtcagcanngagccgaagctcttggcttccacacatactttcgganncgtcgattgagatacaaagctccnagnagacggaccaatcctcaaattcgnactttacc

SEQ ID NO: 1879 - DNA, 232 bp, Glycine max
  unsure (1)..(232): unsure at all n locations; Clone ID: 700555680H1
atnntatcactggattaataattagcacatagtttnttggaagagttgtganaatgggncttgnggagctntntggagtggcatctatgcccntgatcaaagtactaataatcactgcagttggcatgcctctngcactggatnacgtnntntgcngggnaangangcaaggntnccaagtggcatcancttgtgnnttatgtgngcaancccgnactggtnggtggcaatt

SEQ ID NO: 1880 - DNA, 262 bp, Glycine max
  unsure (1)..(262): unsure at all n locations; Clone ID: 700555681H1
gtcacatccctgaggaactatgataagtaacaaagctgaagtaatgacctcaggccttgtgggactgtctctctcttatgctttctccttgacaggatctcaaatattttggactcgatggtattgcaacttattaaactacattatctctgttganagaatcaagcaattcntccacctaccagtggagcctccagccatcttggaggaccaccggnctccatcttcatggccttcaanaggcaggattgatcttcaagcc

SEQ ID NO: 1881 - DNA, 267 bp, Glycine max
  unsure (1)..(267): unsure at all n locations; Clone ID: 700555682H1
cttgcgtttcatgtgttgggaaaattgtgaaaggtgacgtggaccagtcagatggtagcttccttgatgatgaacaaatagaaantggatgggttctcacctgtgttgctctacctaggtcagacgttntcattgagacacacaaggatggagagatcgaatgatcgatatatatcataatgtaatcttgtccattgctcttctaatgccatctatctatgtcgtgttttgatttgttagagtgatttggcattggctagttagcta

SEQ ID NO: 1882 - DNA, 270 bp, Glycine max
  unsure (1)..(270): unsure at all n locations; Clone ID: 700555683H1
ggaagagcttgttgggttctctcagctttcacctttccaggctcggatccaaagaaaaatctnnactttcttcaacaattcatctccacaatttctgggtagtggctttttttagcaggaatggctcaacgttctaatgttccaatgttaggcaagagtgaagagaatgtttcagatacagctcattctgacaaagcccagaaaggtcagccagttnncaaagatgattaatccaatgacaccaaggaaaattcagatgtagtttcttct

SEQ ID NO: 1883 - DNA, 267 bp, Glycine max
  unsure (1)..(267): unsure at all n locations; Clone ID: 700555684H1
caaactcataacaacaactccttctgttcacaaactcatcttcaattccttttctgatctacgcaaggttaaggttaatntntcgctatctacttggacatgaacgaaatcgatgttccttcgttctttctctgccccatttcgctagatatcatgaaggatccagtgacggtctcaacgggcatcacctacgaccgtgaaagcatcgaaacctggctgttctcgaagaaaaaacgacatgccccattaccaaactgcccttgatag

SEQ ID NO: 1884 - DNA, 263 bp, Glycine max
  unsure (1)..(263): unsure at all n locations; Clone ID: 700555685H1
ccatccttattcgttcctcactcancagccactcattctctcttctctattcagtaaacggctgttttgtatacgagctgtcccagtctcagcctatacatcccanaacatcannacaactggttgggctccttgtatggcttcttcctcagttggtagaagggctacatattcaacacaatctttatcaacaaatgagccagttgtatctgtagattggcttatgataactgaaggagccaganatcaaggtactagatgct

SEQ ID NO: 1885 - DNA, 265 bp, Glycine max
  Clone ID: 700555687H1
gggaaatggcgtacctgaacgctaggcgcaccttagcatctaccctgtcacgagctctttcttcttcatccgctagcgcctctcgctttcgcttcgcattcgcattcgcgttgctccccgccaaacaaaccgcacccaaccctcactgggcgagtttcgcggttcggactcaatcttcgggttcgggttactcgcccctgaacgacccgtccccgaactggagcaaccgtccccgaaggagaccattcttctcgatggctgcgac

SEQ ID NO: 1886 - DNA, 267 bp, Glycine max
  unsure (1)..(267): unsure at all n locations; Clone ID: 700555688H1
cacagatctgtcttccgaagcaggaactaaatatggctgacttgttggaatggtcaaagcaagatnagaaacgaatgcttcatgtcgtctaccgtgttggtgaccttgatcgcaccatcaaattttacacagaatgtttaggaatgaagcttttgaggcaaagagatatcccagaggagaaatatgctaatgcttttcttggatttggccctgaagaatcccattttgttgttgaattaacatataattatggggttacctcgtatg

SEQ ID NO: 1887 - DNA, 263 bp, Glycine max
  Clone ID: 700555689H1
ttgctctctgtgaggcttcaatttctaattagggtttcgcttagagtaaccaataaccatgggagtcttcacctttgtcgtccgcaaatccggcagcgaatggagcgccaagcaacattccggcgacatcgaggcctccgccgattccaccttcgatctccaacggaagctcgtgcaagccgctctcgccgttgattcctccggtggagttcagtcctctttctctcccggtctcctacctccgctgtgttccaggtgatagt

SEQ ID NO: 1888 - DNA, 265 bp, Glycine max
  unsure (1)..(265): unsure at all n locations; Clone ID: 700555690H1
caaacgcataaaaaacacagagacagtgtatcttagcgccgccgttgcnctaccatcttcatattattctattgcctttcttcacgttttncnggtttttaagcccttccagtgccctntttangctnatacccttctggttatgatagcttccattcggcgtcagcagaaganccgaagctctggcttccacacatactntcggnnccgtcgaatgagatacaaaggcnncaanccagncgnggccantcctcnaattncaatt

SEQ ID NO: 1889 - DNA, 263 bp, Glycine max
  unsure (1)..(263): unsure at all n locations; Clone ID: 700555691H1
gaaattttaaaaatgactnggataaacttaagaattcaattattgaaattgaataagtaaacaatttaattggattggtcgaatggtatcaaaaaaatggagtactaactcccatttcttatttattattgaattaaccgatcaacttgctttgttatcgaacatttctttttgatttcaaaaattttccggaaaaaatttgaatctatttttatatgcgaatcaatccactacttctggtcctgaggtttctgcgcttgaaa

SEQ ID NO: 1890 - DNA, 237 bp, Glycine max
  unsure (1)..(237): unsure at all n locations; Clone ID: 700555692H1
aaccctaatcctccatcatcgatttgactcgattctctacgctgtntgttatntccttcaaagcaaaacaattccatcgatgaatcgggcattcgcagcttatcgtgaataatgatnttggacgccgcataatgcgnntggcatgggtttggagatgccggagcttcgtagtggaccgcgaacgacgtcgtggctccggttgctcnanaatctccgangcancgntnnngnatgtgt

SEQ ID NO: 1891 - DNA, 268 bp, Glycine max
  unsure (1)..(268): unsure at all n locations; Clone ID: 700555693H1
tgaatctgttctctcaaccatgggcaacctacaatttcaccttctttctgttgttctnnnnnnnnnnnnnnnnnnnnngttgtctatgcctatcataatcataatagcaattccaacaattctanattanantnatttnccaattctcgccaattctctgtnctttctcagttgtccaccaactcctcaaagnccagggagtggaagttcatggctgcaaaacagttcctttgtgctggcattgagtacaggaagcgtcctctatatt

SEQ ID NO: 1892 - DNA, 266 bp, Glycine max
  Clone ID: 700555694H1
gaccctgcccaacatcaaggttcctctcattcttggtatctggggaggcaagggacaaggaaaatctttccaatgtgagcttgtctttgccaagatgggaatcaaccccatcatgatgagtgctggagagttggaaagtggaaatgcaggagagccagcaaaactgatcaggcagagataccgtgaagccgcagacttgatcaagaagggaaagatgtgtgctctcttcatcaactatcttgatgcaggagctggtcgtcttggtg

SEQ ID NO: 1893 - DNA, 260 bp, Glycine max
  unsure (1)..(260): unsure at all n locations; Clone ID: 700555696H1
gctcgaggtcacatccctgaggaantatgataagtaacaaagctgaagtnatgacctcaggccttgtgggactgtntctctcttatgctttctccttgacaggatctcaaattttggactcggtggnattgcaacttattaaactacattatctctgttgaaagaatcaagcaattcatccacctancagtggagcctccagcccnccttggaggnccacnggntccacttcatggnttgngaanggnnggntggtnttg

SEQ ID NO: 1894 - DNA, 279 bp, Glycine max
  Clone ID: 700555701H1
gggcttcctccaccgctttcttcacacccctccatgatttcactcaagccagaacaaccccatcaccccctttgcctttcatcaaatcctcctttgcttcctccaagtcaaccttttttcaccctgccctttccctacaaacctcttccaactttcccaggctttttggaaagcctaagtttttctctgttcatgcaagggctgccacagaaaaaaccatttatgattttactgtcaaggatattgacagaaaggatgtttctcttagcaagtttaagg

SEQ ID NO: 1895 - DNA, 203 bp, Glycine max
  Clone ID: 700555702H1
gagcgacaaagagagtgccaggtgtgtgaaggagctcgttacttgggatccagttgttgttattcttaatcggagatcgcagcggcggattgcatgagcggcggatcggaggcggtgtgagcagaggatcgaaagatgtctgcgatcatagtgtgcgggaagagatcagcgctgttccaagaccttcctcccaagaggatccg

SEQ ID NO: 1896 - DNA, 273 bp, Glycine max
  Clone ID: 700555703H1
acaaatcaaagccatggccacctccaacttctctattgttctctccgtctccctagccttctttttggtgctacttaccaaggcacactcgaccgataccgtttctttcaccttcaacaagttcaacccagtccaaccaaacattatgctccaaaaagatgctagtatttcatcctctggggtgttacaactcaccaaagttggcagcaacggcgtgcccacctcgggatctctcggtcgtgccctttacgctgccccaatccagatttggga

SEQ ID NO: 1897 - DNA, 271 bp, Glycine max
  unsure (1)..(271): unsure at all n locations; Clone ID: 700555704H1
tccgtaaattattcatagcatatttcanaccacactcannaggcttcnctcnctnacttngattngattgatttcatnacatggctacactatntgtttnnnantngtgaattgcatttgctacactatattttaaggacaattatacatagactatatggggttgatggctgcgaaccaaactcnattgttgtctaagatggccatcgganatggacatggtgaagcatccccatattttgatggatggaaggcttatgatgaaaacccc

SEQ ID NO: 1898 - DNA, 114 bp, Glycine max
  unsure (1)..(114): unsure at all n locations; Clone ID: 700555705H1
ctccngtcgtcgnttngatcagcttcttggggggtggtaagaatctnccctctgtgnctctncncnctgctgagngagctncntgtcacnggttcagatttaganccatcatgt

SEQ ID NO: 1899 - DNA, 272 bp, Glycine max
  unsure (1)..(272): unsure at all n locations; Clone ID: 700555706H1
gggaacccttactaccatcaccgcaaggnggnaagcaggggaagaagacgaccatcacgggttcgagctcgtgagcttgctcaccggctgcgtcgacgcaattggatcgagaaacgtcactgcaatcaaccatttcatagcaaaattgggtgatcttgcttcccccaaaggaacaacctcgataagccgcatttgcgcttacttcacagaagcattagccatcagagtcacgaggctctggcctcacgtttttcacatcgccgccgccacca

SEQ ID NO: 1900 - DNA, 201 bp, Glycine max
  unsure (1)..(201): unsure at all n locations; Clone ID: 700555707H1
gtgaagaaagaggttgacattaacaaatcatagcatagcagangnanaagaagaagagtacataganngaaagaacaaaaaaatganttnganggnagacnatgaaganggaagggatctgaagaanccatttctncacacgggaagttggnatcnnatgannggnagacaatccattgtgnacgnttccacacangcnat

SEQ ID NO: 1901 - DNA, 272 bp, Glycine max
  unsure (1)..(272): unsure at all n locations; Clone ID: 700555708H1
gagcctctcttctgatccatcttcaaaagacactgagaagggaattcaacgctttcctcaaagctttgtacctggagtgcacctcttcacatatgangaacttgaagaggccacaaattactttgactcatctaaagaactaggagaagggggctttggaacagtgtattttggcaaactgcgggatgggcgttctgttgcagtgaagaggttgtatgagaacaactttaagagagttgcacagttcatgaatgaantaanatcctagcaaa

SEQ ID NO: 1902 - DNA, 276 bp, Glycine max
  Clone ID: 700555709H1
accgaacactcttcttcaatcaagcgaaggtggtctcgattgcaagtgatccacgatacactctacgcttcacaaaaccttcaaacccaattccacagaattcttctgcgctcaccatgccaccaaagcctttagactatgggtcaataaatgaaaacgtgaagaagagtcaatatgctgtcagaggtgaattataccttcgagctttctgaacttcagaaagagggcaaaaagattatctttactaatgttgggcaacccgcatgcattgggaca

SEQ ID NO: 1903 - DNA, 271 bp, Glycine max
  Clone ID: 700555710H1
ggcagctgcaacatctagtgctgtgttaaacgggtttggatctcacttcttgtgtggaggaaagaggagccatgcccttcttgctgctagcattggagggaaagttggtgcttctgttagtcctaaaagagttattgtggcagttgctgctgcaccaaagaagtcatggatccccgctgtaaaaggtggtgggagtttcatagacccagaatggcttgatggctcgctaccaggtgactatggttttgacccactaggactaggaaaggac

SEQ ID NO: 1904 - DNA, 274 bp, Glycine max
  Clone ID: 700555713H1
caggaagctgctaaacgtcaagaatcaaacggttctggggctgaagtggaatacaaacctcttcccagtggaccaaatggtgccaatgaaaaggacaccaaggaacaagaggtgactattattgaaaatgtatattggaaggagtttggccttcttgtatttgtttgggtttcattccttgcactacagattgccaaggaaaactatacgactacttgttcaacattttattgggtactgaacttgttacaggttccagtttcagttggagtaa

SEQ ID NO: 1905 - DNA, 204 bp, Glycine max
  unsure (1)..(204): unsure at all n locations; Clone ID: 700555714H1
caaaatatacaggatgagtatattaaggcttattatgctgctttacttaagcaacacgaattggaagaagctgcaaaaaaacaattgccaaatacacttgctgctgatgatccttctagcagtacttccaatcgccaggttggcatganatcaaaacgtgaggcagatgatgattgtactgaatgggaggaggctcccattgca

SEQ ID NO: 1906 - DNA, 275 bp, Glycine max
  Clone ID: 700555715H1
ccgcagactcctgttctagataactggtatcgcctgcctgttgcctaccatggacgggcatcttctgttgttatttccggaacagatattgtccggccaagaggtcaagctcatccagttggcagctctaccccctactttggcccttcattaaagctagactttgagttggaaatggctactattgttggacctggaaatgaattgggaaaacctgtggatattaacaatgctaaagatcacatctttggacttgttctgatgaatgactggag

SEQ ID NO: 1907 - DNA, 284 bp, Glycine max
  unsure (1)..(284): unsure at all n locations; Clone ID: 700555716H1
gtgtgcttctgctggcggcggcggttcaagctggcgctggcggaggcgncgtcggaaatcaagaccctattacaatgagncctccgagaatgagctcatgagcaccttcgcatcttaagagattcctggtcgatgtgcagaggcaagcagnaggcnactgaagaagacgangcaagccatcatcgatagctcatgcatttccatcgcagaggcgctggcctcaatctcgaaactttcttcaagtacctcttcagtngactntaagcctcctcttcttccttctc

SEQ ID NO: 1908 - DNA, 273 bp, Glycine max
  Clone ID: 700555717H1
tttcaactcatttgtcttctgtcaggttttcaatgagataaattcacgtgaaatggagaaaataaacgtttttaaaggcatattggataactatgttttcgtgggtgtcatcagtgctactgttttcttccaaatcataatagttgagtacttgggaacctttgcaaacacaacacctctcaccctgtcacagtggttcttttgcttattggttggatttatgggcatgcctattgctgctcgcttaaagaagattcctgtttgaagcacctg

SEQ ID NO: 1909 - DNA, 266 bp, Glycine max
  unsure (1)..(266): unsure at all n locations; Clone ID: 700555718H1
ataactcacaagttttgttctttcctagcaattcgggcgcaatcgtncttctgattcaaggaaggagagcttgttattctctatcaacaaggaaaatgtcaggtgaagaggttgttgttgcagctgagccagctgctgccatcccaggcgagcctatggatatcatgactgccttgcaacttgtgctcagaaaatctctggcttatggtggtcttgcacgaggccttcacgaaggggcaaaagtgattgagaagcatgctgcacaa

SEQ ID NO: 1910 - DNA, 269 bp, Glycine max
  Clone ID: 700555719H1
gagccctgcttattctgctagaaagcaatcattggatcatgaaggcaaacttcacatgcctcatccatggcctgtaatgccctctagtctgtcactgagcatcttggactctaatacaaaaggtcctgcacatggtggtgatacaacttacaaagctcgagggaatttgaggtacagtgcatttggtgaataccctgcactgcatggtcataaagttgagcattcacatggaaacttgatgccacccccacctgcactcctaactcaat

SEQ ID NO: 1911 - DNA, 270 bp, Glycine max
  unsure (1)..(270): unsure at all n locations; Clone ID: 700555720H1
ctcgaacacaacacaacgttagccttaaaagtttaaaccttagcagcgtcgacaatggccggcgaggagctcgccggancaccacacgccggagctgctgtgtctggtccatgacatcgccggaatgtgctcggcgttatcctcctccgccggctccgcggngctcatgttccgcaaggactgcaccgatctggttcgccggatctccctcctcacccacctcttcgaggagattaaggaactcagcaacaacgttgtcggtggttcttc

SEQ ID NO: 1912 - DNA, 269 bp, Glycine max
  Clone ID: 700555722H1
gcagaaagcaagctcatcctagagttttaaaaatggcagcagcctcctccatggctctctcttccccatccttggctggcaaggccgtgaagctgggcccatcagcccccgaagtcgggagggtcagcatgaggaagaccgtcaccaagcaggcctcctccggaagcccatggtacggcccagaccgcgtcaagtacttgggcccattctctggcgagcccccgtcctacctcactggcgagttcccaggtgactacggctgggacact

SEQ ID NO: 1913 - DNA, 270 bp, Glycine max
  Clone ID: 700555723H1
tctctccgcagcagccacacttcttcgccgtttcagctgaagagccatccgcaggtaagcaatggttaagcataataatgttatccccaatgggcacttccggaaacactggcaaaactatgtgaagacttggtttaatcaaccagcccgaaagaccagaagacggttggctcggcagaagaaggctgtcaagattttccccaggcctactgctggatctctcaggcctattgttcatggccagactctgaaatacaacatgaaagtcag

SEQ ID NO: 1914 - DNA, 271 bp, Glycine max
  Clone ID: 700555724H1
caaaatactactatagaattggaagtggtgattctgctcgagacttttggttcgaaacacctcctaaagttgggccagatactccctacaaatttgggatcattggtgatttggggcaaacgtttaattctctttcgacccttgagcattatttggagagtggaggagaggctgtgttatatgttggatcatctttcttattctgatgaacatgactacaaagatatgggtttacggtgggatacatggggccgatttgctgaaaggagtg

SEQ ID NO: 1915 - DNA, 269 bp, Glycine max
  Clone ID: 700555727H1
ccgatcccgacctcgacattgatagcagtggagaaatagtttatgcaatatgagctgctggcagacaatgcaaactgacttctctgatcaatttatatatatagtatgccatgggttgttcaaagggtttggaatatctggaaggaaaagatttcacatctgaagggaaggattctgtgaaaaagtttatgttgtgaggatcattcctgcttatagtcaatggtcctttcatgattacatgctgctttgtattgatagtgtgtcattgt

SEQ ID NO: 1916 - DNA, 272 bp, Glycine max
  Clone ID: 700555728H1
tgaacaatgatttgttccggaagaccatggggccagtgaagaagggctatggaagatgcaggattacagaagagtcagattgatgagattgttcttgttggtggaagcacaaggattccaaaggtacaacagcttttgaaggactactttgatggaaaggagccaaacaagggtgtcaaccctgatgaagcagttgcctatggtgctgcagtgcaaggaagcattttgagtggagagggtggtgaagaaaccaaagacatccttctcctgga

SEQ ID NO: 1917 - DNA, 271 bp, Glycine max
  Clone ID: 700555729H1
tcaaacgttaggacaatgactgttccatctatagatgttcaccactttgctcatttgtacaacgcaaaacatcctttagccctgtgtactgatgactcgggagtcttctctacctgtctctccaaggaatacaaaattgctgctgattcatttgggctgggaaggagggaaatgtttgagctatcaaggaatgctgttgagcatatattcgcagatagcaaagtaaaggaggatttaagaaaaattttcaattcagtggcaaaaaaatatg

SEQ ID NO: 1918 - DNA, 248 bp, Glycine max
  Clone ID: 700555730H1
gtcatactttttcggcacccgtctaaacaacgttaacacgacaaccttaaacaacggaagattccacgcgctcttgaacttcggcaaaaagaagacggcgccgcagccgccgccgaagaaaaaggaagtgaaagtgaaaccctccggagaccggctggtgtggttcccgaatgcggagccgccggagtggctcgatggaagcatgatcggcgaccgcgggttcgacccgttcgggttcgcgaacccgc

SEQ ID NO: 1919 - DNA, 212 bp, Glycine max
  Clone ID: 700555733H1
caaaaagaaaaagtaaacggctcctattttttgtgatgttgttttctaatggtcaatgttgtaagaaaaacaataatgttttactataattcgattgattttgtttaattcacgtgtaatttattgtatttggaagttcaacttgtgctacttggcaaagtatgaatcaatcactgcttggtcatgttgaaaatttagttctgggcagaaac

SEQ ID NO: 1920 - DNA, 269 bp, Glycine max
  Clone ID: 700555734H1
gaaacgagagatcttccaattccagtgacaagtaggtagttcccacagcatgagcaagaggagcatgtatcttcataacctccatagaaattatctggctgatatcggggcagataatcaaggtgtctcatcatgtcaagcttcaaagccaggtccagaatcaaggccctgatgtcatactaagtgaggcagaactttctcaacgcagcagcattatcatcatctacaacatctattctggatggaaaattgttcacacgcaaactctc

SEQ ID NO: 1921 - DNA, 265 bp, Glycine max
  unsure (1)..(265): unsure at all n locations; Clone ID: 700555737H1
tctccaaagacagctctttggtctgcctccacgatacagagattcagtaagaacaataactccagggttgcccatttttctgtacnactactccactcaccaactccatggtatctttgaggctgcaagttttggaggatccaatattgatccaacggcttgggaggacaagaagtgccctggtgaatctcgtttccctgctcaggttcaagtgattactaggaaagtttgtgagccactagaggaagattcctttagaccaatt

SEQ ID NO: 1922 - DNA, 265 bp, Glycine max
  Clone ID: 700555738H1
cgccgcattgctctcagcttcacaacaccatggaccacgttagggaaacctctgcttgggtagctagccgctcctcccacgttctcgttgactctgcaggaattgagaaagtggtgagcaccattgattccattcccaaggttgagtgggatttcgaagggattcactactttgataatggaccactcaccgttcagtacctgtttgtgttggacgctttaaatttttgcttctggcctgataaggatttgaattatgatgattt

SEQ ID NO: 1923 - DNA, 267 bp, Glycine max
  unsure (1)..(267): unsure at all n locations; Clone ID: 700555739H1
cttcaactgagggtgagagtgacacaaatctagggagcactactctaaaagttctattagattcttcaaaacatgaccatgcatcgcgagtcttgggcttttgtcttcggcgttatgggcaacatcatctcctttggagtgttccttgctccattgccaaccttttaccaaatctacaagaagaaatccactgaagggtntccagtcacttccttatgttgtngcactgttcagtgcaatgctttggatttactatgctttcgtcaa

SEQ ID NO: 1924 - DNA, 231 bp, Glycine max
  Clone ID: 700555741H1
caccattgccatggatccttacaagctccggccatccagcgccttcaattctcccttctggactacaaattctggtgctcctgtttggaacaacaactcctctttaaccgttggagctagaggtccaattctgcttgaggattatcatcttgtggagaagcttgcaaactttgacagggaacgtatcccagaacgtgttgtccatgccaggggagctagtgcaaagggttt

SEQ ID NO: 1925 - DNA, 266 bp, Glycine max
  unsure (1)..(266): unsure at all n locations; Clone ID: 700555742H1
cactgatactgccaccttcactttcaaacctttctcccaaaanaaccattaaatnctnatccgagnntcggagnattcnctcattgctgcatcagctactcgcattttngcatttnttccgggtgtccgtacttttcaatggaccgacgctggcgctggaagaaaaaatcgtcggacaaggctgtgcttgagaaagcagctgcggaattggactctgctgcgggtgctgctgcaactcagaagccgagctacatccaaatctcggt

SEQ ID NO: 1926 - DNA, 152 bp, Glycine max
  Clone ID: 700555744H1
caacttatgtgataaagtactttggcatacaaatacaaattgaacttcatcattgaagtgtccagcagttgtcttgctggttgatcatcagggaatttacaaatgctcgaaggatgcctacaagaagtatatcaagaaaacttttgcagctc

SEQ ID NO: 1927 - DNA, 274 bp, Glycine max
  unsure (1)..(274): unsure at all n locations; Clone ID: 700555745H1
ctccctccgatttctccagaacagcaagggagaatcaattcctcatcgctgcaattacttcnttcactgctctagtttctcttctttcnttcttccaacctcttctcttctatacccttcagaanagaaattaaaaaacgtagcttcagattattctagctcttcatttttccatgntcaanatnangcngtaaatttctnaancgcacngttgcagccattttgnggtcgaannncncgggntgnggnccctggncgggtcngntttgaangg

SEQ ID NO: 1928 - DNA, 269 bp, Glycine max
  Clone ID: 700555746H1
gccttcctctctgcagagtgcagagctttctctccccgttgcttcattcattctcaacaacaaaccaatctttaaaatgagggggggcttgtggcaacttgggcaatcgatcactcgccgtcttgcccatggagataagaaggctgttgctcgtcgatgttttgcctcagaagctgagctgaaaaagacagtgtttcatgacttccatgttgctcatggtgggaagatggttccattgctgggtggagcatgccaatccaatacaagga

SEQ ID NO: 1929 - DNA, 272 bp, Glycine max
  Clone ID: 700555747H1
agagaggctcctaagggaacaaggccttcaaggaaacccctacaggatattggttggggacttaaaggagattgtgaagttgcaaatggaagcaagatccaaacccatgaatctctcccatgatattgtgccacgtgtgtttgcacatctgcatcagagtgtcctcaaacatggtatgcttttgtttcttagagcatctccaaccggaggtgctttgtttgcaactatcatctactgtttgcctctttagtgttatctattttgttactata

SEQ ID NO: 1930 - DNA, 272 bp, Glycine max
  Clone ID: 700555748H1
tgggatcagtttgtgaagagcgatggataacagttaccatcacaacggtggcattggtgatagcttcttcagcaccattattattggcggcatgcccttacacctccatcttcagcttcggtgattcacttgcagacactggcaacttgtatttcagcccctacccacccaccaaccactgccttttccctccctacggcgaaaccttctttcaccatgtcactggacgctgctccgatggccgcctcatcatcgatttcatcgctgagtca

SEQ ID NO: 1931 - DNA, 267 bp, Glycine max
  Clone ID: 700555749H1
caagattctcacaaacaactcttgagaaagaaagaatggctgccaacacattgatgagttctgccatctcagccttcccatctctcctttcctcctcaaaatccagatttgccgcagcagttcctctttccagctttgttgtcaccaatgcctcttcttctcgcttttccatgagtgctgactggatgcctggccagcctagacccccctaccttgatggttcagcacctggtgactttggattcgaccctcttcgtcttggtgaag

SEQ ID NO: 1932 - DNA, 265 bp, Glycine max
  unsure (1)..(265): unsure at all n locations; Clone ID: 700555750H1
cttgaaccctctctcctctcctcatacccatttctncattctctggcaccctatttntggccttgtnccgcatctcctacccctntcctctgctgcatgcaaccatgaagattttcaaccccnccaaatgctttctccagaacgtggtgtgtcctttcgacaccctcttcatcattaaaaggtttaagcccttcgatctgggtctctcccacctccaccaatnccaattcctatccnactatngaaaccanatccctcgttcatc

SEQ ID NO: 1933 - DNA, 256 bp, Glycine max
  unsure (1)..(256): unsure at all n locations; Clone ID: 700555751H1
tttagatctgcaaacttcagcttagagcannacaatanntaannaatccacctttnctatcaacctctagctatatccattttnanccanatgacagnaaaactttccancaatccatcctngaacgtgcctttactatccgagtggaatcancangatgaggagnaagccatagcctctcatccttctaccanaaatactgtgtccttctttcgcacatgccttaanggactcaatgcaatatcaggtgttggaa

SEQ ID NO: 1934 - DNA, 261 bp, Glycine max
  unsure (1)..(261): unsure at all n locations; Clone ID: 700555752H1
tcctttgatataaactaagctctttcatttttccaatattaaaacttccagcttcttccttcctctgtgactcaaactgcatcaaccaagtnagtgggattttctataaattgttgtcaatttgtcangtcatgtatatgagaaactcatganaactctggtggtgacttattagttctctcggcaagtaaggatttcaaacaaactaaagttgaagagagtataaatgactttggaaactcttcaatccaatgagttctc

SEQ ID NO: 1935 - DNA, 263 bp, Glycine max
  unsure (1)..(263): unsure at all n locations; Clone ID: 700555753H1
ttgaatctttcaccactatttgataggcatcaggattatgtaaagcggcaaactcgttttgtctcccgtaaaccagcaaaagttataatttcttcaattgaagctgttgcagagtcaatgggtcttaaggtccattctcgcaattacaaggtgaggcttgaagncgtttctgcaaacagggttggacaatttgcagtggtcttggaggtgtttgnagttgcgccaggcncttttcatggttgatgttcgnaaggccactgggg

SEQ ID NO: 1936 - DNA, 261 bp, Glycine max
  unsure (1)..(261): unsure at all n locations; Clone ID: 700555754H1
acatacacccacatatttcatatgggtacttgttaatttgggtgtggattgttggtttgtnacttgtnttgttccgttcaggtgattgtntgattgagccttgaagaaatggaccacagcgctgatgcacatcgcacggacttgatgaccataacgcggttcgtgctgaacgagcaatccaagcaccccgagtcacgcggcgatttcaccatcttgctcagtcacattgttctcggttgcaagttcgnttgttccgctgtc

SEQ ID NO: 1937 - DNA, 265 bp, Glycine max
  unsure (1)..(265): unsure at all n locations; Clone ID: 700555755H1
cngccatggccacccacgcggctcttgcttctacaaggatccctcncanacacaaggttcccatcgaagngcctctcactctttcccaagccantgcgcnttaaagagncttgaggtgacananttctcngggcttagatccacttcatgtgtcacatatgcnaacagtgcnagagaatcnnccntnnntgatcttgtagntcccaactcantcccaagacnaatggatcaatcctgngangggaganacagtggccaagtngaa

SEQ ID NO: 1938 - DNA, 160 bp, Glycine max
  unsure (1)..(160): unsure at all n locations; Clone ID: 700555756H1
catggtaacggagcagaggaaaagcgtgtggtgtcttcttctccggtggatcctcaggcctgtaatttgggattagccactcatgaatcaaaatcaatccattaaatcaaaatacctttctcactgttaactcatcaacaatacctaatntttttggttc

SEQ ID NO: 1939 - DNA, 264 bp, Glycine max
  unsure (1)..(264): unsure at all n locations; Clone ID: 700555758H1
cgtatacacgttacaacaagttctttttttttaggcccatctaactttgtctctattccaccaagtatttatcancccttgctgttttcacttcacttccgttctgtttctattcctcactaggagctcctctccactggttcttcatctgcatgcacacagttgcatagttttggaaaccaagaattcctgaagaagggtagcatcaacaagcagttctgaaaatggagatcaccaatgtcagtgagtatgaggctattgcaa

SEQ ID NO: 1940 - DNA, 266 bp, Glycine max
  Clone ID: 700555759H1
caaccctaatccaccccaacccaaccctattgaattgaattgggggaagaagaacatagaaagaagaagaaaaatctgcacaattgttgtaattgaacgatgtctgctgcggtgtgcggaagcaagagatctttgttcgaagagcttcccccttccccgccagtatccaagaggctccgctgttcctcctcccctattcgcctctctctcccttctctcatcgaccaccttcgccctctcttccctcatatggatgaccaggtcct

SEQ ID NO: 1941 - DNA, 265 bp, Glycine max
  Clone ID: 700555760H1
gtagaactagtgatgcaggacaccagcattcttggtgctgaaagtcaccctctccatttgcatggctttaacttctttgttgttggtcaaggttttggtaactttgatccaaagaaggaccctgtaaacttcaatcttgttgatcctgttgaaaggaacacagttggtgtcccatctggtggatgggttgcaatcagattcctaactgataacccaggggtatggttcatgcattgccatcttgaagtccacaccagctggggtc

SEQ ID NO: 1942 - DNA, 268 bp, Glycine max
  Clone ID: 700555761H1
ctgcagcattagggtttatcatctgcttcaatggggaagggaacagggagcttcggtaagaggaggaacaagacccacactctctgtgtgaggtgtggccgccgcagcttccacctccagaagagtcgctgcgccgcttgtgctttccccgctgcacgcacgcggaaatataactggagcgtcaaggcaattcgcagaaagaccaccggaactggcaggatgagatacttgcgtaacgtgcctcgccgtttcaagagtggcttcagag

SEQ ID NO: 1943 - DNA, 269 bp, Glycine max
  Clone ID: 700555762H1
ccagaatcaaatcaaaaggtaaaaaacaaattaaaagaaaaagggaaaagtatactacgcagaagaggtggttcaaagttcaatggctgagaagaaggaaatgattccgcaacaatttgacatcgatgccaaatgggacgcctgcattgatctcaccgtccgtcgcttcgtctactccgcaaccgccggtgcatttggcggtctcctatttttcaggagtcctgtgactcgatgggcatctattgcttttggtgctggagttggaattg

SEQ ID NO: 1944 - DNA, 270 bp, Glycine max
  Clone ID: 700555763H1
ttcattctcatctttctctcttctctctccacccaaaccctaactcccgaccctgttcccctctcgtatccgtcatgaaaggaggaaagtccaagaccgaatctaagagagccgatcccaaacttgctgtgaataagaagggagccgccaccaaggctaggaaacccgccggcaaggggaaggcagcgaaagaccctaacaagccaaagaggcctccaagtgctttcttcgttttcatggaggagttcaggaaggtattcaacaaagaac

SEQ ID NO: 1945 - DNA, 271 bp, Glycine max
  unsure (1)..(271): unsure at all n locations; Clone ID: 700555764H1
ctaaatagagtggtaaactctaaactcagaatagcatcagagtttctctgagatttgctttaatncaggtttgaaaacaaactattacgcagnaaaagaaaaactcatatgggaatgactcttattgagttttttgtttcttctctttgatacattcacgatgttnaggaatactatctgatttgcttcaattgttattggtgagcattgaccctcttctcaaaatctgtctcttnatttctttcttccttcccgagaacttgagttccta

SEQ ID NO: 1946 - DNA, 261 bp, Glycine max
  unsure (1)..(261): unsure at all n locations; Clone ID: 700555767H1
cgaganatggcgatggcaatggcgcttcgcaggctttcatcttcaattgacaagcctctgcgccctctacttcaatgccggttccctctactacaagtcgtctttgcctgatgaagctgtttacgacaaggagcgacccggagttacatggccgaagcagttgaatgctccacttgaggtcgtggatcctgagattgctgatattattgagcttgagaaantaggcaatggaaggggctagaattgataccgtcagagaat

SEQ ID NO: 1947 - DNA, 261 bp, Glycine max
  unsure (1)..(261): unsure at all n locations; Clone ID: 700555769H1
ggggatgaacatggtgtcaaaaggtgttcaaaatgttcttgattttcttcaggatgacttccctgatatggatgttattggaatctctggcaatttctgttcggacaagaaagccgcagccgtgaattggattgaagggcgtggcaagtctgtggtgtgtgaggccataattaaggaggatgttgtgaagaaggtgttgaaaaccagtgtgncaggccctgnggcaacttaatatgctcaaaaaccnntacgggctcagcc

SEQ ID NO: 1948 - DNA, 108 bp, Glycine max
  unsure (1)..(108): unsure at all n locations; Clone ID: 700555770H1
taagattnnngattcancaatgnnctctgcttctnctactcttctcaagtcatactcctgttcttgacaagtnagagtgggtcaanggncanacccttcgccaanctc

SEQ ID NO: 1949 - DNA, 252 bp, Glycine max
  unsure (1)..(252): unsure at all n locations; Clone ID: 700555771H1
cgttaaacggcgccggattgcttaaccgcgggtttnctgactctgcttctgtncaattgccttcttggcactngncgatcgatgttnccgngaataatctcgaacccggttcgacggacggtggggatggtgntggtngtngtgnggnnngtngcggtggtncntcncagggtgtatcttcgggaacgggnagaatttgaagcangatgtncactccantcccgattcgnccatgctcgaaacgacgtcgtc

SEQ ID NO: 1950 - DNA, 263 bp, Glycine max
  unsure (1)..(263): unsure at all n locations; Clone ID: 700555772H1
ctcatccataacattgatactcttttgctctcagtactgcacctncgtacccagagaaaaactaatgatttcactacgaccctataacacatgtcttgaaacaacaaagtttctcttcaacccttcaaagcttggaatctctacncaaacatgcttgatagcaccaaggaagacatcacgtagaatacaagtgaaatgcagtggtgcagaaaacaagggtgagagacgaacgtttttgacactggaagaagctggtttggttg

SEQ ID NO: 1951 - DNA, 266 bp, Glycine max
  unsure (1)..(266): unsure at all n locations; Clone ID: 700555775H1
cgcagagacaccattccaatttccatggcactctcctttcgccccgtcatcnacccccgcgtcaccgaccggttcactctntcagttccncncanccaancntcccnctcttccaacttcggcacctccctaccgttctcctccccctcacgagtcgccgcggcggcttccttccctcctgcttctncgannacgcngtntncatncgnaacntcgatcgtggtttcatngtgatnnccgncatgctcngccgcatcgagcnnctc

SEQ ID NO: 1952 - DNA, 262 bp, Glycine max
  Clone ID: 700555776H1
cacgcacactgtcacaggtgtagcggcgaaactgaggtcgtagaaagaatggcgaaaacgacgtcgttgttgctctttacactgctcctcttcggaaccttagctctcatccaggcgaagaaatcgaaggaggatttgaaggaagtgacccacaaggtttactttgatgttgagattaatggaaaagaagcaggtcgtattgtgatgggtctttttggaaaggctgttccaaaaactgcagaaaactttcgagctctttgca

SEQ ID NO: 1953 - DNA, 266 bp, Glycine max
  Clone ID: 700555777H1
gttgtttggtctcttctctcttatccatggcatcaacgtttctcaccctaccaactcccttcctacacaaaaccaatgccatcagtttctctaacaagagaccctcatttttgcagaggagctctctgaagattcatgcaattaccaaaaaatgggaacccacaaaggttgtgcctcaggctgatagagttcttattcgtttggaggagctttcagataaaacagttggtggagttttgctgcctaaatcagctgttaaatttgag

SEQ ID NO: 1954 - DNA, 264 bp, Glycine max
  Clone ID: 700555778H1
ttgaagttgaagtcttgcccttctctcttcaactccaaacacaagacatcatcatccatggctgcctccgtctccactgtcggagctgtcaacagagctcttttgaacctgaatgggtctggacctggggtttcagctcccagttcatccttctttgggagcagcttgaagaaggttattggctcaagggtccccaacacaaagatttcctctggaagcttcaagattgttgctgtagaagagaagaaagagattgaagagacc

SEQ ID NO: 1955 - DNA, 266 bp, Glycine max
  unsure (1)..(266): unsure at all n locations; Clone ID: 700555779H1
ctcgtgagcatgctcttcttgctttcacccntggtgtgaagcagatgatctgctgctgtaacaagatggatgccactaccccgaagtactctaaggctaggtatgatgaaattgtgaaggaagtctcttcctacttgaagaaggttggttacaacccagacaagattccatttgtgcccatctctggtttcgagggtgacaacatgattgagaggtccaccaaccttgactggtacaagggaccaactctccttgaggctcttgac

SEQ ID NO: 1956 - DNA, 267 bp, Glycine max
  unsure (1)..(267): unsure at all n locations; Clone ID: 700555780H1
tttcactctacttctctctcctattgcggctagggtttaggtttttctttcaccgtctccgttccttcaatcttcttattctctttcatctctgatggagacgttgcgggtttagttctaaggggtggttctggccttgggtttttggaacgtacggtgtcgttttggggttgggaaaacaaattctgagagatggcaaccacgaacccttttgatttgttgggtgacgacgctgaggaccntnncanctcantcgcggcgaacaaa

SEQ ID NO: 1957 - DNA, 124 bp, Glycine max
  unsure (1)..(124): unsure at all n locations; Clone ID: 700555782H1
gctataagctagtttatcgtgaggagaatatgnagttgtttgttttctttgttgctgcantagnccnnggagcannnncatgccatggcgcangctnccaaaggttccctctccgacatgaaaa

SEQ ID NO: 1958 - DNA, 258 bp, Glycine max
  unsure (1)..(258): unsure at all n locations; Clone ID: 700555783H1
gctataagctagtttatcgtgaggagaatatgaagttgtttgttttctttgttgctgcagtagttttggtagcatggccatgccatggcgcaggctaccaaaggttccctctccgaatgaaaactggctatggtgagcgttcttcggaggtaaaatgcgcaagttttaggcttgctgtggaagcacacaacatccgagcntttaaaaccattcctgaagagtgcgttgaaccaacaaaggactacattaatggcgaac

SEQ ID NO: 1959 - DNA, 258 bp, Glycine max
  Clone ID: 700555784H1
acgagtctctcatactatgatactatagctacacttcccactgtgtctcagggtctgtgatacacacagactcacttcaagttcccagcttttgccatttttcccactgtttattgaactgcagaacatggcacagattttggctccctctacgcaatggcagatgagaatctcaaaatcctctcccaatgcaactcccattacatcaaacatgtggagttctttattgtggaaacaaaataagaaagtttcacctac

SEQ ID NO: 1960 - DNA, 259 bp, Glycine max
  unsure (1)..(259): unsure at all n locations; Clone ID: 700555785H1
ggaaatgccctactacatctccgncctccaaatcagcgccgccattagctccgccgacggccgaggcacccaccgccgccccctccgccatcgacctgatctccattatgtccaaacaaggctgcaaggccttcgcggaccttctaagaggctccaaggcccttccatctttcaaggaaaacgttnacggnggcttaacggttttctgccccaccgacagcgccgtcagcggtttcgcgccaaagtacaagaacctgac

SEQ ID NO: 1961 - DNA, 258 bp, Glycine max
  unsure (1)..(258): unsure at all n locations; Clone ID: 700555786H1
aaaaaaggaggctgaagcataatcagcgcggcggtgtaagatggtggcaacggcgatcgaggaattgcgaaccctctggattggcgatttacagtactgggtcgacgagtcctacctctctcagtgcttcgcccacagcggcgaagtggtttccatcaaaatcatccgcaacaagctgacgggccagcncgngcggctacggcttcgtcgagttcgtctcgcacgcctcggccgaagcctttctccgaaccttcaacg

SEQ ID NO: 1962 - DNA, 263 bp, Glycine max
  unsure (1)..(263): unsure at all n locations; Clone ID: 700555787H1
cnggnactncaaaagatccnngtgggtcatctttgacaaaggaggggagatctagcacgncgggnctccccacatacatgnancanntacataggcaccattcacctgttaaagaaaaacggagagaanatgtcngcaaggtantcccatcccnctnggtagacatttagagggatnacctcttattaganaagcgatanccccgactctttgtctctcctggnttctccaaggttgttgtgaactggccaaaggaaaacctt

SEQ ID NO: 1963 - DNA, 259 bp, Glycine max
  unsure (1)..(259): unsure at all n locations; Clone ID: 700555788H1
ctacacaacacaacaaancctcactctctctttcacgaantcacgctctgtttcagatctgaagccacataaccctaaccatcaaacggctaggtgtcgctgggacttcaatggcagtgactgaagctcagaatcctcttcttggagaaaacacatgtggttccttgttaaaaaagcgccggaaatatgggatgaggttggtgagagcgacgagcaacgagacaagatgcttcttcagttagagcaggagtgcttggat

SEQ ID NO: 1964 - DNA, 260 bp, Glycine max
  unsure (1)..(260): unsure at all n locations; Clone ID: 700555789H1
ggttcaactgaggtgatggctttgaatttgccntctcccgcccaagtgaagcccttatttttctcttcaaataactccacaaaacttccaggtagcttttctttgaagagaaaagatagtgacacaacagtagagagacgagtttattgctctgccgctgctcaatcaccaccaccagcatggccaggaacagctattcccgagccttctgatttcaagacatgggatgggcaaaaanctatttctgtcttaggatctac

SEQ ID NO: 1965 - DNA, 259 bp, Glycine max
  unsure (1)..(259): unsure at all n locations; Clone ID: 700555790H1
ggctgatttagaagatgcactgtcaccgacctgggaaaatcttattagtggtcaagtgaacttgaaggatgctgtggatgggaccataagcttccatgacaaagtaaggnacaggatttacaagctcaatgatcagacagcaaagctttttgtgagaccaagancttggcatctacctgaagcacatattctgnttgatggtgaacctgcaactggttgccttgttgatnttggcctctacttctaccacaaccactca

SEQ ID NO: 1966 - DNA, 260 bp, Glycine max
  Clone ID: 700555791H1
gttgaagtcttgcccttctctcttcaactccaaacacaagacatcatcatccatggctgcctccgtctccactgtcggagctgtcaacagagctcttttgaacctgaatgggtctggacctggggtttcagctcccagttcatccttctttgggagcagcttgaagaaggttattggctcaagggtccccaacacaaagatttcctctggaagcttcaagattgttgctgtagaagagaagaaagagattgaagagaccc

SEQ ID NO: 1967 - DNA, 260 bp, Glycine max
  Clone ID: 700555792H1
gcaaaaatggcatcattcaccatgacagcttccatccttggcagcccagccgtcaccaaccggtcggcagtagcaacgcagaggagatcactcgtagtgaatgctgccaaagctgttgaagcagaaaaggtcagttatgacaatgacatggatggtagcaatggaaggaggaacttgatgttcgccgcggcggcgctgctgtttgctctgttgctgggatggcagtggcagatgagcctaaaccaggaaccccagaagcc

SEQ ID NO: 1968 - DNA, 263 bp, Glycine max
  Clone ID: 700555793H1
gacaaacacttcgccaaccttctgctgcatcagttgtgagatgcaaccccaccaccccatcaggcctcaccatcagagctggttcctatgctgatgagctcgttaagaccgcgaaaacagtggcttcaccagggaggggtattttggccatggatgagtccaatgctacctgtgggaagcgtttggcttcaattgggctagagaacactgaagctaaccgccaggcataccgtaccctccttgtgacagttccaggacttggt

SEQ ID NO: 1969 - DNA, 256 bp, Glycine max
  Clone ID: 700555794H1
ttcaacgtttccatcatacacagatcccaatcctctctcaagccctaatttcccctcatttccatggccacagaagaggccactgtcgcggtggaacccgctcccgaacctgcctccgccgatcctcccccggaggagaaggaggagaccaaacctgaagccaaggctaagaaaaccaaggagcccaaacctaaaaaggtttccagacctcgcaaccctcccactcatccttcctacgaagagatggttaaagatg

SEQ ID NO: 1970 - DNA, 198 bp, Glycine max
  Clone ID: 700555795H1
cttgttcctccgctcaacaactataataacatctttctctctccgacacagatcacactatggccacctcaagcgccaaatcagtccatgatttcaccgttaaagatgccaagggaaatgatattaatcttggtgactacaaaggaaaggtccttatcattgtcaatgttgcctcacaatgtggctgactaattcaat

SEQ ID NO: 1971 - DNA, 266 bp, Glycine max
  Clone ID: 700555796H1
ctcatcaagggttgtgaaagcagagaagtgagatacactaagttatcctcataaatacactctaattaggtggcaagataagtgtctaaccttagtaacattgccacatattgtgttcattttggaattgtgccactaaaattctattcaattcatctatggctgcctcttcttatgctatgcaatcaatcctggcaaaccctttgatccgcatttccagcgggtctagggtgaaccaatttggcgttcctgctttgcacatgaga

SEQ ID NO: 1972 - DNA, 285 bp, Glycine max
  unsure (1)..(285): unsure at all n locations; Clone ID: 700555801H1
atggctttcaaagagatcaattcatgaagtttcataggaaaactagattgacctcttcagtgacacttggtagtgtccaaagaagggcatcacaagggtcattagggtgtttccctccatcatgcattttcaggcaagtgttttacaagttgaagagtcattgaagcaagctttggtttgncaaaggagtagtagtccacagtatagctacgattttcgcagctattctctcaattttgatgatggcctttcaagtgaccacattccacctcgcttttgttgatg

SEQ ID NO: 1973 - DNA, 279 bp, Glycine max
  Clone ID: 700555802H1
atttaaagaaatcaacacacacaaacacaacaacatatggaggtgctaagggtgcaaaccatagcttccaaatccaaagatgctgccatcccagccatgtttgttagggcagagacagagcaaccaggcatcacaaccgttcaaggggtgaaccttaggtgccaattattgattttagtgacccagatgaagggaaagtggtgcatgagattttggaggcaagtagggactggggcatgttccaaattgtgaaccatgacatacctagtgatgttataa

SEQ ID NO: 1974 - DNA, 267 bp, Glycine max
  unsure (1)..(267): unsure at all n locations; Clone ID: 700555803H1
cctggctctgttccgtcgatgacgatggcgnntagggtgcgaaacactgacctccgctttctcattcttctctctctcttgtccatcacttccgccaaggtcttcttcgaggagcgtttcgatgacggatggggaaatcgttgggtaaatcagattggaaaaaagatgagaacctggctggggagtggaaccacacctctggccaatggaatggagacgctaacgacaaaggtattcaaaccagtgaggattacagattctacgcta

SEQ ID NO: 1975 - DNA, 279 bp, Glycine max
  Clone ID: 700555804H1
gcggcagctaacttcgggctccatcttcttcgatctctcaaactctatcggcgcagaaccaatcctatatcactatggggaagacacatggaatgggagctgcccgcaagctgaagtctcaccgtaggagacaaaggtgggctgacaagtcatacaaaagtctcatcttggaaatgaatggaagaagccttttgctggttcatcccatgcaaagggtattgttcttgaaaagataggtattgaggctaagcagcccaactctgccattcgaaaatgtgc

SEQ ID NO: 1976 - DNA, 277 bp, Glycine max
  Clone ID: 700555805H1
ctgaggtgatggctttgaatttgccttctcccgcccaagtgaagcccttatttttctcttcaaataactccacaaaacttccaggtagcttttctttgaagagaaaagatagtgacacaacagtagagagacgagtttattgctctgccgctgccaatcaccaccaccagcatggccaggaacagctattcccgagccttctgatttcaagacatgggatgggcaaaaacctatttctgtcttaggatctacgggttcaattggaactcagacactg

SEQ ID NO: 1977 - DNA, 276 bp, Glycine max
  Clone ID: 700555806H1
ttacacaagaactctccaaggatcctccttcccacgaaattcatttggtgggaaaatccaagaagagggtggaatttcaagccagggaagatggattatttcaatgcaccaggaagaaaccatctctttgttccggggccggttaacatcccgaccagatcattcgggccatgaacagaaacaatgaggactaccgttctccagcaattccagctatgaccaaaacactgcttgaggatgtcaagaagattttcaagaccataactggaatcccat

SEQ ID NO: 1978 - DNA, 276 bp, Glycine max
  unsure (1)..(276): unsure at all n locations; Clone ID: 700555807H1
ctgaaattcatggtatganagaanttgaatgatggaaagccaagaaagataaaaaatgctagagcatattcttttactcttgaagaagacaccacaaattatggtatgtatgagaaaggtggtattgtcacgcaggtcaaacaacctaaggtatgaactttaagccactcagggaagcactcagtgatcctggcgattttcttctgagtgatttttcgaagtttgatcgcccacctctccttcacttagctttccaggctttggataaattcattt

SEQ ID NO: 1979 - DNA, 274 bp, Glycine max
  Clone ID: 700555808H1
gagatgttgatcttgaagactatactgaagagttgattgttagtcttgacccatcaaaagctgttgccaataagatccccacgccgcctccgaagaagtatactgcaataaacatgcttgatggcaggaacagaattattgaatataagaatctactctttacaaggatgatgaaaagttgaaggccttgagtgggatgaaagaaacagggtatgttcctgacacaagatatgttcttcatgacattgatcaggaagcaaaagagcaagccttg

SEQ ID NO: 1980 - DNA, 267 bp, Glycine max
  unsure (1)..(267): unsure at all n locations; Clone ID: 700555809H1
gttaaaagccttagccttccctacaactccaaacatgnaagacatcatcatccatggctgcctccgtctccactgtcggagctgtcaacagagctcttttgaacctgaatggttctggagctggagcttcagctcccagttcagcttctttgggaccagcttgaagaaggttattgcctcaagggtccccaacagcaaggtttccggtggaagcttcaagattgttgctgtagaagagaagaaagagattgaagagacccagcagac

SEQ ID NO: 1981 - DNA, 272 bp, Glycine max
  unsure (1)..(272): unsure at all n locations; Clone ID: 700555812H1
atttcgtttggcaaatgggtatgcagctttgaaagatgctctagcctctgaaaatgtgagatttcaaaggaaagctctcaacttgatccattacctgttgcatgagaataattcagactgcaacatcgtgaacgagcttgggtttcttcgatgttgatgcaccttgcctcaagtgaagattcagatgtgagagaagctgcccttcgtggccttctccagcttgctcacaatgcganagatggcaaggatggcnatgagaaagacagtgcgat

SEQ ID NO: 1982 - DNA, 275 bp, Glycine max
  Clone ID: 700555814H1
cgcaagctgcatacaatgattggttcatgtcgctgtacaatgtattcttcacttcacttcctgtaattgcattgggagtgtttgatcaggatgtctcttctaaattatgtctcaagtttccattattatatcaagaaggcgtccaaaacatccatttagctggaaacggatcatcggttgggcattgaatggagttgtgacttctgccatcgtattcttcttttgcatccgtagtatggaataccaggcattccgtaaaggcggtgaagtcatgg

SEQ ID NO: 1983 - DNA, 277 bp, Glycine max
  unsure (1)..(277): unsure at all n locations; Clone ID: 700555815H1
ctcgagcgactaagattaatcgggttactatagttccttgtggtcatgtattgtantcgtagatgttcttctgcagtgtcaaggtgtcccttttgtcggcttcaggttacaaaagctatcagaatttttcgtccgtaatatctccaatgctttttgatcattttatttggacattgtcagagttccattcgccaatataggctaactgaagttggctaagattaatcgggttacattggactctgacgtgaatattatgtcnntgtgattgagcccc

SEQ ID NO: 1984 - DNA, 279 bp, Glycine max
  unsure (1)..(279): unsure at all n locations; Clone ID: 700555816H1
cttggttcaggagaatcaacaaattaacactagggagatantttcaatcatcaaattgtaaccatgccaatccgttcccgtgaacctgcacagaggccaggattgttagaccgtcaaagaccactanatgcagtccttggcggaggaaagcttgctatatattgctatggaaagacaagatatcatcggcatcaatggtagctgggttctcnatcatntggntcctctttgaagtggtcgantacaattttctnactctactatgtcacatctcatggc

SEQ ID NO: 1985 - DNA, 280 bp, Glycine max
  unsure (1)..(280): unsure at all n locations; Clone ID: 700555817H1
caattttcgctctttcggtctctccaaattgagttcagagtcaccaccgaatccgttcctacaatggcgacggtgacgttttccttttccgctaaaaccttaactctaccctatcaccccaaaacctcaatctcgagcttcgctccggtaacgaanttcgcctctctcattctatcgtcacccgaacccgaaattgtaaccggattcgggcggcgctggatggggatttctcggcgaaaaggagcaacaacaacgagcagagggagacgataatgttgcc

SEQ ID NO: 1986 - DNA, 276 bp, Glycine max
  unsure (1)..(276): unsure at all n locations; Clone ID: 700555818H1
caagtctgagtgggtgaagggacaaacccttcgccaaccttctgcatcagttgtgagatgcaaccccaccaccccatcaggcctcaccatcagagctgnttcctatgctgatgagctcgttaagaccgcgaaaacagtggcttcaccagggagggtattttggccatggatgagtccaatgctacctgtgggaagcgtttggcttcaattgggctagagaacactgaagctaaccgccaggcataccgtaccctcctcgtgacagttccaggcttg

SEQ ID NO: 1987 - DNA, 274 bp, Glycine max
  Clone ID: 700555819H1
ctttggaacaaacaacaatagaggggttgtggtgctctgtgtgctgcaatttccttttgagcttgtgtttgattcatcaaatcatcaaagatgactgtaggggcaggaatatctgttgcagatgggaacttgatggtgttggggaacaaagtctgagccatgtccatgacaaggttcttggtacccctgcatgtggtggtgctttgctcaatggggcattcattggggttcaatcccatcacaagggtagccgcacagtcttcccaattggcaa

SEQ ID NO: 1988 - DNA, 274 bp, Glycine max
  unsure (1)..(274): unsure at all n locations; Clone ID: 700555820H1
gctagaatgatcattatgcatgattacccccttcacatggttgancatccgggttttgttgcatttgtccaaaatctgcagccccagttcaatatggtgacatttaacacaattcaaggagactgtgttgcaacttacctgatggaaaagcatgtgttatgaagtattttgatggattacctggacgtgtgtgtctcacactggacgtttggaactcaagccaatctgtggggtatgtgtttattactggacattttgtcgatagtgattggaa

SEQ ID NO: 1989 - DNA, 274 bp, Glycine max
  unsure (1)..(274): unsure at all n locations; Clone ID: 700555822H1
ctttgangcgtnttcnaccctctccgaccatnggancctgcttttccgccaccaaagtaagcggctcnaacggcnatggcntcaacgtncaacaaaaagcgcanngggacnacgaagaagccgaaatcagagacngcgaaggcgantccccaaggcacaaggcggcaanttcgcgccacgtgccgtgcgggaagcgcaccgatttcggttacaaganggatttcaatcagcgttactcgtcggaaanttgctcggacacggccaatttggttat

SEQ ID NO: 1990 - DNA, 273 bp, Glycine max
  Clone ID: 700555823H1
cttctcttctcttcattttctgtggttctcactttctttactctaatcttctaatctcttattttcttcccccctactgttactccccgcttctctgaatccctttctgttaatcatctgtctttcaactcgtgattttttgggtttgcctaccaaaaagattcaaactttgaaaatttttctcgaaagccaggtgttttcagaatcgagatccagctttttttttgtttgtttttaaaaaattattattttctttcgttcagccgcgagggt

SEQ ID NO: 1991 - DNA, 272 bp, Glycine max
  unsure (1)..(272): unsure at all n locations; Clone ID: 700555824H1
gccactcatcatcgacccaccctttctcaactttgcgganagagggagttgctgacaccacccatcacctgttctcgttttgcctcacgatggtgtcgtaggcgacgttgccgttatcgtcgacggtgacaggaaggattttggatccagggcagagacaaaacgagaaagctacatggtgctttgattctgctatggaacattgaggcaaagctcagcatctaaaaccctgtaactgtgaagctatagtctcttgcttgcactttgcagtg

SEQ ID NO: 1992 - DNA, 269 bp, Glycine max
  unsure (1)..(269): unsure at all n locations; Clone ID: 700555825H1
ctggtgattgatgcttnagagcaaagcagaagagatgatctcgagtctcttggttatgttttgatgtacttcttgagaggaagtcttccttggcagggtcttaaagcgggaacaaagaaacagaagtacgagaaaatcagtgaaaaaaggtttctacctcgattgaagccttgtgtcgaggttatccaacagaatttgcatcttacttccattactgccgatcattgaggtttgatgataagccagattatgcttatctcaaaaggata

SEQ ID NO: 1993 - DNA, 249 bp, Glycine max
  unsure (1)..(249): unsure at all n locations; Clone ID: 700555826H1
attggaaatgtttgatggnncataatatgattgacgcagatacaccatggcncancttagtgaaaatgactctagaagatatttccagcagcttattgacggtgtagattattgccacagtaagggagttatcacagagatttaaagcctgaaaatcttttactcgattcactaggaaatataaagatttccgattttggtttgagtgcatttcctgagcagggggtgagtatccttcggacaacttgt

SEQ ID NO: 1994 - DNA, 103 bp, Glycine max
  unsure (1)..(103): unsure at all n locations; Clone ID: 700555827H1
cttccttaagctccttagtgctgctccttgcngctctaatnnantatcccctcaagttcttgcaaactatgagantnccccagtgtacangcctcncactgag

SEQ ID NO: 1995 - DNA, 271 bp, Glycine max
  unsure (1)..(271): unsure at all n locations; Clone ID: 700555828H1
caaattcttaaataaaagtgcccccattttcccaaaatcnaccatctagagttttctcttttccactgaaaatcaaattagggtttggatttcggaattgccacagaatcatggccactctgaaagagcttcttcctcctgcaaaatcctctccaccgcctactacgaccacaccaacgatccatggttcaagcagcgtttctcctcanangangaggagttggnntctnanntgntgcgactggagagaaagttggtacctttgcattgg

SEQ ID NO: 1996 - DNA, 272 bp, Glycine max
  unsure (1)..(272): unsure at all n locations; Clone ID: 700555829H1
gaattcacaaccgacaatggcgacaaaacctcgtttggcttatctctcttccacttntcttcttctntcntgttgtaactgtctttacttcggtgtcggcacaagccccagaatccccatcactctacaacaccttccttcaatgcctcccaaatacacaantaacccctccaacatagtcttcgccaacaccaaccccaagttcnccactatcctccaaanctacatccgaaacgcgcgtttcaacacctcctcgacgcgaaaacnattat

SEQ ID NO: 1997 - DNA, 273 bp, Glycine max
  unsure (1)..(273): unsure at all n locations; Clone ID: 700555830H1
cgccactcatcatcgacccaccctttctcaactttgcggagagagggagttgctgacaccacccatcacctgttctcgttttgcctcacgatggtgtcgtangcgacgttgccgttatcgtcgacggtgacaggnaggattttggatcnagtgcagagacnaaacgagaaagctacatggtgcnttgattctgctatggaacattgaggcaaagctcagcatctaaaaccctgtaactgtgaggctntagtctcttgcttgcacctttgcagt

SEQ ID NO: 1998 - DNA, 233 bp, Glycine max
  Clone ID: 700555831H1
acaacagacaagtttgttgttcctgttctaatctctggaccatgtcatacaactgaatctaattgcaattcctgtgagccgtggcaaagcttttgaatttagtgcctctcactctgtttacccttccagatattgcagatacagcaagatcatgagtgggacttcggaaaagaaacttgtaagaatcgatgttagttctgatactgtatgcccatggtgctttgttggcaaaa

SEQ ID NO: 1999 - DNA, 278 bp, Glycine max
  unsure (1)..(278): unsure at all n locations; Clone ID: 700555832H1
gcaaaacagttcaggccatcacatatttaactttgttgaaacacttgcacaatgattctggtccacatcttatagtatgtcctgcttctgttctggaaaactgggaacgggaattaaaaaggtggtgtccatccttctctgttcttcaataccaggggctggacgggcagcatactgcaaggagttgaactccctgtccaaggcaggattgcctcctccatttaatgttcttcttgtgtgttattcactttttgaacgacacagtgcacagnagaaag

SEQ ID NO: 2000 - DNA, 280 bp, Glycine max
  unsure (1)..(280): unsure at all n locations; Clone ID: 700555833H1
ccatgcatcagccatgagcagtgatggtggatgcatggacanaaccatactccagggaatatgcagccttcccagctccttgggctccgtactgcaaagttctggcctaccacaggacgtgttgataatgtgtacggtgaccgcaacctcatttgacccttctcccagcatcacaggntgttgaagaacaagcagctgccacagcataatgtgttcanatgacaactattttccatttnccgttgtacataaactctattcctatcatacagttcttgca

SEQ ID NO: 2001 - DNA, 273 bp, Glycine max
  Clone ID: 700555834H1
gttcggttcccaacaactgagtttcttggtggtggaaggattgtggtttctctggctttgcctaaatctgataagcaagataggtttgtgttttcatcaattaaggccttggctgtggagttaacaagagaagcacatgcttatagggagagaaattgcccaacagggataccaagattgatcgtggatttgatcaaaggcctgattcgtggcctcctgcgaatagggcagataaaccgtcgcttcggaatccactactccgtcatgagagga

SEQ ID NO: 2002 - DNA, 272 bp, Glycine max
  unsure (1)..(272): unsure at all n locations; Clone ID: 700555835H1
cgtctgtgacacacacagactcacttcaagttcccagcttttgccatttttcccactgtttattgaacatggcacagattttggctccctctacgcaatggcagatgagaatctcaaaatcctctcccaatgcaactcccattacatcaacatgtggagttctttattgtggaaacaaaataaganagtttcacctaccagttctgctaaatttagagtgctggcaattaagtctgacaatatcaccatcaacaggctcgagggtctactta

SEQ ID NO: 2003 - DNA, 273 bp, Glycine max
  unsure (1)..(273): unsure at all n locations; Clone ID: 700555836H1
ctatctccgatggctctctctgcgcatatttgccgtttccccgccacacgcgctgtccacttctttgccggagagtctcaccagaatccggtgccgganacctctctccgtccgatgctccggcgattccacttccggctctgtgggttcgagttcgatccgaaggtgtttcggaagaaccttactcggagtaagaattataaccgcaaaggatttgggtacaaggaagagaccctccaactcatgaatcgcgagtacaccagtgatatcatt

SEQ ID NO: 2004 - DNA, 226 bp, Glycine max
  Clone ID: 700555838H1
acccttcactttactctctctctctgacagctaaaatgcaaggaggaatgagatcatttttgtcacatgggaatgtcattagaaatgctgttctacaacgcgtggcatggtgaaccccctgctacagacaattgcctcttcgcggtttgaatctgttacgcctgctcgcattgaggagcatggttttgagagcaccacaatttcagacatcttgaatgataaaggc

SEQ ID NO: 2005 - DNA, 268 bp, Glycine max
  Clone ID: 700555839H1
gcatctatattaaagactctacgaacatttcagattatgccctacttctatttggtggtaatcttgtccctagcaaaagtggtgagggcattgacatgcttggaggttaccttcatttctctgcttcgaaaagtgtcatcgagttaaaaggaaactacgtggggagcttgacaagcttctgaacagaaaaattgaagaaccaggatttgacgtttctgctgaaggaaagggagtggttgctgctgctgttgaattgctgcacagtcaa

SEQ ID NO: 2006 - DNA, 268 bp, Glycine max
  Clone ID: 700555841H1
ctcaaggtcaagtcattacctgcaaagctgcggtggcctgggaacccaacaagcccttaactgtccaagacgttcaggtggctccgcctcaggccggcgaggtccgtgtccaaatcctcttcaccgctctctgccacaccgatgctacacttggggcggcaaggatcccgaaggtctcttcccctgtattcttggccatgaagctgcagggattgtggagagtgttggagaaggtgttactaatgttcagcctggggatcatgtcatt

SEQ ID NO: 2007 - DNA, 265 bp, Glycine max
  Clone ID: 700555842H1
attttatcagtgtctagagagaaacaggttgcatctttccggtgtgaaccaacaggagagctgctttttgaactcatgtcctcttcttcttccaagttatcaataagaaaatcaacaaagacacttggttctgcatctttctctagaaagactatcttgacccagtttcaaaactctatgttgagaaatggttggagttggtgccgggttctggtactatgagctcaaagccaatcttgttacgagtagccatctcatttactgt

SEQ ID NO: 2008 - DNA, 152 bp, Glycine max
  unsure (1)..(152): unsure at all n locations; Clone ID: 700555843H1
cnatagttactcactcactacacaccagaggcagagaganctctcgctcactctcaaaatcacttccaccacnccgannaatgnnnacngtncntanaattaaaaaccctaacctctctcaaaattnnccatnatcggngtnacttcncaga

SEQ ID NO: 2009 - DNA, 267 bp, Glycine max
  unsure (1)..(267): unsure at all n locations; Clone ID: 700555844H1
ttgttccagacggcacacagggtacatttcaaactgtaaattttagctcttttttttggctcttttctatcagcagttgccttaactaggataattgtgtcctagttctacaatgtaacttatgaatgaataagattgagatatacttctaaaatagaattgtttcaaacctnttatagctttacatggacaaagccataaatcctctcccaataaagtttcaaactatctaggatannngangaaaannaaaanagggnggccgcc

SEQ ID NO: 2010 - DNA, 268 bp, Glycine max
  unsure (1)..(268): unsure at all n locations; Clone ID: 700555846H1
cttctcttgcggctagggttttagcgcanttcttctagatttaaggnagatgggtaaggnaaaggttcacatcagtattgtggtcattggccatgtcgactctgggaaatccactaccactggtcacctgatttacaagcttggagcattgacaagcgtgttattgagaggtttgagaaggaagctgctgagatgaacaagaggtctttcaagtatgcctgggtgctggacaaacttaaggctgancgtgaaagaggaatcaccattg

SEQ ID NO: 2011 - DNA, 272 bp, Glycine max
  unsure (1)..(272): unsure at all n locations; Clone ID: 700555847H1
gaaacagcgaaagtgaaataccactacttttaacgttattttacttattccgtgaatcggaagcngggcactgcccctactttttggacccaaggtcggcttcggccggtcgatccgggcggaagacattgtcaggtggggagtttggcgggcggcacatctgttaaaagataacgcaggtgtcctaagatgagctcaacgagaacagaaatctcgtgtggaacaaaagggtaaaagctcgtttgattctgatttccagtacgantacgaac

SEQ ID NO: 2012 - DNA, 274 bp, Glycine max
  unsure (1)..(274): unsure at all n locations; Clone ID: 700555848H1
cagataagcctanacacgaaactcncaaattccctcaacactggagtcgctggaaaattcattctgggactcagctgagctgnccaagcatgattcaaaatggttgcattgtatcccaagggtgtgcccctctgaattctaggtcacgcaccatggcatacctagtacctctgcctttcgttgcgcttctctaatgcctcccaaggttgncgtctctaacatccggagcttttggggacataatctggaatgtanacccttgttgcnaagagga

SEQ ID NO: 2013 - DNA, 272 bp, Glycine max
  unsure (1)..(272): unsure at all n locations; Clone ID: 700555849H1
cttggttcaggagaatcaacaaattaacactagggagataatttcaatcatcaaattgtaaccatgccaatccgttcccgtgaacctgcacagaggccaggattgttagaccgtcaaagaccactacatgcagtccttggcggaggaaagttgctgatatattgctatggaaagacaagatatcatcggcatcaatggtagctgggttctccatcatttggttcctcttgaagtgggncgaatacattttcttactctactatgtcactccc

SEQ ID NO: 2014 - DNA, 270 bp, Glycine max
  unsure (1)..(270): unsure at all n locations; Clone ID: 700555850H1
atggattttgcgaaatcttttgcagggtgaatttgtaagggcaataattgttcaagaatttgctaaaggtttagatgcacttggtctagcaaccatggagacagctgctgccagagttcctttcagtagtttcttttattccccnttatgactaaagangntataatcaacttgagaaacttccgacgccttatgctattgctgttgggggccagaagaaaagaagaatccagtacagtaagatttctattttacttaaagagaactaca

SEQ ID NO: 2015 - DNA, 271 bp, Glycine max
  unsure (1)..(271): unsure at all n locations; Clone ID: 700555851H1
gttgaaaagaaaccctagcaagtggagcaatggcagacgttgaagtcgatgtgnnnnnnnnnnnnnnnnnnnggctgccgaagaagagaacgttcaagaagttcagttttcgaggcgtggatctcgatgcacttctcgacatgtccacgatgaactcgtcaagatgttcagtgcccgcgctcgtagaaggttccagagaggcctcaccagaaagcccatggccttgatcaagaagctccgtaaagcgaaaagggaagctccaccaggtgag

SEQ ID NO: 2016 - DNA, 272 bp, Glycine max
  unsure (1)..(272): unsure at all n locations; Clone ID: 700555852H1
cagaagtgaccccaatatacttagccatatctttacttcccaaaacttgctctacaatgagtttccttcgttcttttgcaaganacaaggatatatcaaaagtaggacgcagaggtatccattgcatgcagaaactatgtgcagaaaaatatctcctgattcactagagaaggcccaaaatcgtgtgatagatgctgcactcacacttgttcgagaaaatacaaggcttaagaaagaactcgtgcatagtttgggaggtgctgtggcaactt

SEQ ID NO: 2017 - DNA, 273 bp, Glycine max
  unsure (1)..(273): unsure at all n locations; Clone ID: 700555853H1
cgctcacgttatccacaacactctcaacccctccttaaaccctaaccaatccaaccatggcttcttcttccaccttcactgcaatgncccgcctgcaagctctcctcctccgccgccatctcctccttcccctcccgccgccgctccaacncgtcgttctgtcgatgcgcagcgcgccgccagggtctccgccatggccaaggagttgcacttcaacaaagacggcaccgcaattaagaagctccagagcggtgtgaacaagctcgcggatct

SEQ ID NO: 2018 - DNA, 247 bp, Glycine max
  unsure (1)..(247): unsure at all n locations; Clone ID: 700555854H1
ctctttctttctgctttgtccaataactcagaacatgcccacttggtggggtaaaaagtccagcaagagcaaggaccaacaaccgcaagangaccaccaccacccccctcatggcggaggaggaggcgccgccaccagtgtccttanttcaatttcaacaagctcaacaagcccaggcccgacaggccctccaagagcttcgacgacgtcgtcagaaactcccctcgctgcagccgcgatttcagtt

SEQ ID NO: 2019 - DNA, 263 bp, Glycine max
  Clone ID: 700555857H1
gtgatactgtatttatgatcactaaagatcctaatccaggattagagggacatgtcttccccaatccagttgatgcagaaggttacatggtaatgctggtatacaaaaatggatcccttacccgagaagatgtgcgcaactgtatgcaaacaaatcttgggatgttttcaataaatttttgcagcaaacacagcctttaaatggtggaaagttaggtttctactacaaggagcatgaaattctacctcctcttccagttggtt

SEQ ID NO: 2020 - DNA, 201 bp, Glycine max
  Clone ID: 700555859H1
ctcccacgtggcacactaagaaacctcgaacgccgaggcacgggaaacattctcgtaacaacaaccctttccatttggtcctgaagagggttcggaggaggcgaattcccatgatgagaacgaggagcagcttctttatagggtccccatattcgacccttttgttgctgagctatgtgggactaatagttctccttctcc

SEQ ID NO: 2021 - DNA, 111 bp, Glycine max
  unsure (1)..(111): unsure at all n locations; Clone ID: 700555860H1
gcactttcccnttcttccaattcatgcgtgntntngatcgantccctttctctatcacgccaaatcccaccgaatngtgcgacncggtatgatnntatanaatnntggnga

SEQ ID NO: 2022 - DNA, 266 bp, Glycine max
  unsure (1)..(266): unsure at all n locations; Clone ID: 700555861H1
tcaaaagcagcttggattgaagcacagtatgctgcatgggagaagcagcagaaagaaattgngcatacaagagacttgataagtagattaggtgctggagcaaattctggccgtgccttcttctgctgagaagaagctggagagnttcaggaagaggaactagtggagaagccatttgaacggaaacaaatgaaaatcaggttccctgagcgtggaaggagtggaagatctgttgtagcaattcagaacttggaatttggctttga

SEQ ID NO: 2023 - DNA, 241 bp, Glycine max
  unsure (1)..(241): unsure at all n locations; Clone ID: 700555862H1
catcaacagagaagccatgaaaactctgatttgtgcaccaaacgcagccttcaatctctcaaaactttctccatggaaaccaaacttccaagcttatcatcatcaccctacacacaaactcaactaccccttcaccacattaaagcacgtgctagtgccaaaggcttttcttccacggggcctccaactgttgcaagtgataatgccaatactactaagaagcccatgagaaganaaaaca

SEQ ID NO: 2024 - DNA, 273 bp, Glycine max
  unsure (1)..(273): unsure at all n locations; Clone ID: 700555865H1
ctgcttaanaatgtgagtggagaagctaagcctggaagattattagccataatgggaccttcaggttcagggaagacgacgttgcttaatgttcttgcgggtcagctaacagcatctcctcggttgcatctgagtggcgttttggagtcaatggaaagcctggttccaagaatgcttacaagtttgcttatgtgagacaggaggatctctttttctcgcagctcacagtgcgggagacattgtctcttgctacagaactccagcttcccaact

SEQ ID NO: 2025 - DNA, 264 bp, Glycine max
  unsure (1)..(264): unsure at all n locations; Clone ID: 700555866H1
tgnctaaaggagaagaagcaacagctgagcttgatgctaagatgaaaaaactttactgaagatgctatcaaatttaagatggatgacactgctgagttgtatgattttgatgatgagaaggatgagaacaaatttgatttaaaaaaattgtgagtgaaaattgggtcgagccaccaagaagagaacggaagcgcaattactcggagtctgaatacttcaagcaaacaatgcgccaaggtggccctactaaaccaaaagagcctc

SEQ ID NO: 2026 - DNA, 261 bp, Glycine max
  unsure (1)..(261): unsure at all n locations; Clone ID: 700555867H1
ccaaaacccacataaganaatataanaaagagcattacttttttaatttctaccttcttttatgcaaccagaagtgtagtgtgttgtgtatgactaggtttctgccagccctggggataatgggtaattatctagattntcagctaaagtagaagcagctcacagttccagaaccccttctggaatttcaaaaactagaccttcatctgttcctcccaacttatctattctgtcatatagtgaagcaagtgatttctcaaa

SEQ ID NO: 2027 - DNA, 267 bp, Glycine max
  Clone ID: 700555869H1
gagtttgttgatcgagataactagaaacagtgtgatgaaaatgaaggtccttgttttcttcgttgctacaattttggtagcatggcaatgccatgcgtacgatatgttccctctccgaatgaacactggctatggtgcccgtactcggaggtgaaatgcgcaagttggaggcttgctgtggaagcacacaacatctttggctttgagaccattcctgaagagtgcgttgaagcaacaaaggaatacatccatggcgaacaatataga

SEQ ID NO: 2028 - DNA, 52 bp, Glycine max
  unsure (1)..(52): unsure at all n locations; Clone ID: 700555870H1
ttggtgccttatcgctganntttncatcgtctnnccttctcttntatttctt

SEQ ID NO: 2029 - DNA, 268 bp, Glycine max
  unsure (1)..(268): unsure at all n locations; Clone ID: 700555871H1
canaaatggngttgttcttctacgcggtgttcggcggtttgggagcggttgttgcagtgacggagctgagcaagagcaacaaggaccgaatcaacacctcttccgcattcaattccttcaagaacaactacctcatcgtctattcctcatgatggctggagattggctacaaggtccatatgtctactacctttacagtacatatggatatgggaagggagacataggacaactcttcattgctggttttgggtcttccatgctcttt

SEQ ID NO: 2030 - DNA, 263 bp, Glycine max
  Clone ID: 700555874H1
ccttggaaggctttcttagggttcatgaatgggaaggctccacagactatattaaccgaccaaaatatatgtctcaaagaagcactatccacagaaatgccaacaacaaaacatgctttctgtatatggatgatagtagcaagtttccatcttggtttaatgctgttttaggggaacgatacaatgattggaaggcagaattttatagactttataatcttgagtcagttgaggattttgaactaggctggagggaaatggct

SEQ ID NO: 2031 - DNA, 138 bp, Glycine max
  Clone ID: 700555875H1
gcaattcactctgtacaattcttcgttcgttctctgcagttatatcctttttgagcttcaatggcggacgctgaaacctttcgctttccaggctgagatcaaccagcttctaagtctcatcatcaacacattctacag

SEQ ID NO: 2032 - DNA, 263 bp, Glycine max
  unsure (1)..(263): unsure at all n locations; Clone ID: 700555877H1
gttctcgaggcactcctcctgcgaaacgacgtcgtttttctccccaacttcctcactttcancattcntctgcttttccacctcattngccaccaccttcgccggagcaaactcttttcgcttgcctccggcacccaccttacttcctggcacangccggcgacctcgacctccgacnagaaccctcgccggcgtccccccggancgaggcggggcccacattgcgnttccgattcgncgacgtaccggagtcctaatttcct

SEQ ID NO: 2033 - DNA, 266 bp, Glycine max
  Clone ID: 700555878H1
aaggccctggataaaaagcccaggtttggattggctattgccctcaaaccttgaggtttttattcatttttgagaaaagtgatcggagttccaaacttcgttcaatttttttggtggcccttgaaaggagggaaaataattagtcaacagatgagcatttctaggctcttcatgaatggataaaatattgaattttcaataacttggatgagtggcttctgtttcccattttttattgaattttctgcgtttcctccaacattgtg

SEQ ID NO: 2034 - DNA, 98 bp, Glycine max
  unsure (1)..(98): unsure at all n locations; Clone ID: 700555879H1
ctacgaagggctatatagcataaacatttgagtcttcattgacacaatgtcgacntcttccattaacgggtggtgcctctcttccatctcnccagcca

SEQ ID NO: 2035 - DNA, 120 bp, Glycine max
  unsure (1)..(120): unsure at all n locations; Clone ID: 700555880H1
cccttctcttctcanccncacactccnatctcacacactcctacncatccaacaatgtctctcaccattccctcnaanctntcnaancncgtcgcactctgntcgnaactnancccaaag

SEQ ID NO: 2036 - DNA, 269 bp, Glycine max
  unsure (1)..(269): unsure at all n locations; Clone ID: 700555881H1
ctatttttcatttntgaatacatggattgtaatctttatcnactaataaaggagagagaaaagccctttcagaggaagagatacggtgctttatgaggcaagtgctacaaggacttagtcacatgcncaagagaggattctttcangggatttaaaacctgagaatatgctggtaacaaatgatgttttgaaaattgctgattttggactggctagagaagtatcatcgatgcctccatatactcaatatgtttccacacggtggtatc

SEQ ID NO: 2037 - DNA, 181 bp, Glycine max
  Clone ID: 700555882H1
aaaataatgaaaatggcacgcttgccagtgatttttttcccatttttgaccctgctcctgatatctgtctcgacgaatattaatgtacttggggagctaccgttttcagcaatgtttgtgttcggagattcattagtggacatggaaataacaactatctcaactccttggcaagagccaa

SEQ ID NO: 2038 - DNA, 266 bp, Glycine max
  unsure (1)..(266): unsure at all n locations; Clone ID: 700555883H1
ctaattgtttaaacctaattctcatttcttcatcgttcgatanttctcctcctaaagatgcagatcttcgtgaaaactttgaccggtaagaccatcacccttgaggtggagtcctccgacaccatcgataacgtgaaagctaagatcaagacaaggaagggatcccacctgaccagcagagacttatctntgcgggtaaacaggttgaggatggtcgaacccttgccgactactacatccaaaaggatncantctccactcgtgct

SEQ ID NO: 2039 - DNA, 268 bp, Glycine max
  unsure (1)..(268): unsure at all n locations; Clone ID: 700555884H1
caagcgaagnnanaagcgctttctaacttaagtgatggcgaacgcagctgaagtttcagccttgaaccgcatcaaactgcatcttttgggtgaactctctccactggccactcccctaaactattttgatgaatcaaaccctagccctctgaatcttccaattcccaatcttcttctgtttctcttaaccactacttcactgacctcttcgaattcgactccaaaccccaaataatcgacctcnaaactcccaaaacactaacttcag

SEQ ID NO: 2040 - DNA, 267 bp, Glycine max
  unsure (1)..(267): unsure at all n locations; Clone ID: 700555885H1
atttattccgcgtctataagctttcttgttttgctattgcttgctccgcaatcataatttcatcatcgaatcaaatcaattttgaaggttcattataatggcggaagagataaccaagaacgacgtcggagtaacctccaaaacaccagaagcagctccaggttctggcctcgttggattcccacttccaccgatcacatcatcnctgccgagaagcgccttctttccgtcgtcaagactggttatgttcaagagcatgttaacatt

SEQ ID NO: 2041 - DNA, 265 bp, Glycine max
  unsure (1)..(265): unsure at all n locations; Clone ID: 700555887H1
caagctcatcctagagttttaaaaatggcagcagcctcctccatggctctctcttnccccatccttggctggcaaggccgtgaagctgggcccatcagcccccgaagtcgggagggtcagcatgaggaagaccgtcaccaagcagcctcctccggaagcccatggtacggcccagaccgcgtcaagtacttgggcccattctctggcgagcccccgtcctacctcactggcgagttcccaggtgactacggctgggacactgctg

SEQ ID NO: 2042 - DNA, 268 bp, Glycine max
  unsure (1)..(268): unsure at all n locations; Clone ID: 700555888H1
caaagaccagcacatctttgctcaaattcactcaccgttgcatccaacaactttgantcggtaccaggtggactcggnccgtcttgtgctgaatgttagaagcaccagcttgtgtcgaaggtttcgtggcttgaaactgtgggtattgagagactcaacttccaattccagccaccaaagcaacctaagantagaaatcatcacttcaaaaataatttggaaaatgaaaagggatcggtttctgattcatcctcaattcttcatgttc

SEQ ID NO: 2043 - DNA, 262 bp, Glycine max
  Clone ID: 700555889H1
cgaaacatggcaagagtggtggcactccaacagaaccaactatctttctctaccttagcttcctctctttctgacttcagtggaaccagacttcaaactcaacttcagttcaagagaaagcaatgccatccaaaagggtcttctacgtctccgcatcgagcaccaagaaaatcctaataatgggaggcaccaggtttattggtgtgtttttgtctaggctccttgtcaaagagggtcaccaggtgactttattcacaagagg

SEQ ID NO: 2044 - DNA, 263 bp, Glycine max
  unsure (1)..(263): unsure at all n locations; Clone ID: 700555890H1
aaaaaccttcccttctcttctcacccccacactcccatctcacacacccctcgcatccaacaatgtctctcaccattccctccaacctctccaagcccgcngccctccgccccaaactaagcccaaagctaaggtccgccgcacaaccaccatcgtctgnnnnnnnnnnnnnnnnnnnnnnnnnnnnnnngtgtcctccgacctgaaggcgttctccgccgcgctggccctctcctccatcctcctctccgcccctctccccg

SEQ ID NO: 2045 - DNA, 262 bp, Glycine max
  unsure (1)..(262): unsure at all n locations; Clone ID: 700555892H1
gctagcaataatgcgtttttgaaacncgnattcatctgtatccacacgatttactagaaggagatcgcaatttctccatcntctcgtttcggtggctcgtgaaatcgaaagttatcgaaactttcgcgcgacacgaagtatgggaaccaagcanaatttctatggctgacgaaccactatatccaatagcagtgcttatagatgagttgaaaaatgatgacatccagctgcggttaaactcaattcgcaggctatcnacaat

SEQ ID NO: 2046 - DNA, 261 bp, Glycine max
  unsure (1)..(261): unsure at all n locations; Clone ID: 700555893H1
ttaccagttgccacactacaccgagatnccccctaaacccgnttgcgttgttgtttgcgaagaaatggcgactaagaggagcgtgggaacgttgaaggagggtgatttgaaagggaagagggtgttcgtgagggtcgatctaacgtgccttggatgacaaccttaacatcaccgatgacactagagtccgtgctgctgttcccaccatcaagtacttaactggtcatggagccaaagtgatcctttctagccacttgggag

SEQ ID NO: 2047 - DNA, 126 bp, Glycine max
  unsure (1)..(126): unsure at all n locations; Clone ID: 700555894H1
cagcgccggagatgcgctacgtgtaatttatgagcgcaatgtganacatgnngacttngnccttntcagtggagancctgtaagcaanatnacgcttactcaggnacttctagngcanntngngag

SEQ ID NO: 2048 - DNA, 220 bp, Glycine max
  unsure (1)..(220): unsure at all n locations; Clone ID: 700555896H1
cacagcaacaataacaatggcagnctcactacaagctgcagctaccttcatgcnacccaccaaggtgggcatggccacttcgnaacctcaaatctacacaatgcatttctaaggcttttggcttngaacccgctgnagctaanctcatngntccctnaagcccgntctcnaagntntngctcannnatgngtngacgncancnnaattgnncgattngcc

SEQ ID NO: 2049 - DNA, 291 bp, Glycine max
  Clone ID: 700555901H1
cctaaatagggttagggtttatgcaatcgaactccagcgacggtgcatttgtgcgtaatcgatggcgaatcgcacggatccagcagcgaagagcataagagggacgaaccctcagaacctggtggagaagattctccgatcgaagatctaccagaacacgtactggaaggagcaatgtttcgggttaacggcggagacgttggtggacaaggccatggagctcgaccacctcggcggcaccttacggcggcaaccgcaaacccacgccgttcatgtgcctcgtcatgaaga

SEQ ID NO: 2050 - DNA, 285 bp, Glycine max
  Clone ID: 700555902H1
agccgagagtacatttgtggaaaatatgcaggatgtgccccagctggaaagttctaaactgaacaaaattgatatggtggaccatgaaaagtttgccaaatttgaaaggaaatcagctaagcataaggatgaaacagaggataaatcaatacaattgtatcagaggctgcaaggtgtgacaaaagttttgaattgacagattaatgctagaacaagactgtggtgttgctgaacctgaaactgaaaacgaggatgaaatcttaaaatctgagttaggcagagaca

SEQ ID NO: 2051 - DNA, 91 bp, Glycine max
  unsure (1)..(91): unsure at all n locations; Clone ID: 700555905H1
gtggacagcgaggtggatatncaccatantancccttnngagnacggagtgaaaaganataagctggacttccttgcttatttcttttcca

SEQ ID NO: 2052 - DNA, 286 bp, Glycine max
  Clone ID: 700555906H1
ttttagaagaataccccctcttttgctgcatcagaggagttgtaaattaagagcatgggctgcacaagctcttgtattcatcatcttctcttaccttctcagcggaggctgcaagacaaagtcttggaccaagatcactccaatctccatttggcttctccagaaaagcctcctttcttgttaaggcagctgctaccccccctgtacaagcaaggatcagacagacctttgtggtttgcatcaaagcaaagtctttcttacttggatggcagccttccgggtgact

SEQ ID NO: 2053 - DNA, 291 bp, Glycine max
  unsure (1)..(291): unsure at all n locations; Clone ID: 700555908H1
attgaagattccacaacagtgggagggagatccaaaaagagagagtggaaaagatggcgcggttnatcacagtggtgtggtgcgcngtggcggtgctattatgcgccgcggccggtgcgtcgtgggtggaggaggcggcgaacccgatacgaaggtgtctggcgtggaggcggaggtggttcgggtgatcggggagtgccggcgtgcgttgaagtttgctaggttcgtgagcaggttcgggaagagttaccaaagcgaggaagagatgaaggagaggtacgagatattctc

SEQ ID NO: 2054 - DNA, 293 bp, Glycine max
  Clone ID: 700555909H1
gttccagatcgtgcttaccatcatcagagatgggttgaagaccgatcccaccaggtaccgcaagatgaaggagcgtctcgttggggtttctgaggaaaccaccactggtgttaagaggctatatcagatgcaggcgaatgggactctactcttcctgctattaatgtcaatgactctgttaccaagagcaagtttgacaacttgtacgggtgccgtcactctctccctgatggtctgatgagggctactgatgtgatgattgctggaaaggtggctgttgtggctggatatgg

SEQ ID NO: 2055 - DNA, 291 bp, Glycine max
  unsure (1)..(291): unsure at all n locations; Clone ID: 700555910H1
gcaccgtcgccgccgggtccaattcggctgggccttgcagctctctctcttgaacgccctacattncagacgttgggaataggacatgcgttttcttcgtttatttggctctgtggccccattacaggtcttgtggttcaaccatgcgttggtattggagtgataaatgtacttcaaggtttggcagaagacggccgttcattctggcaggatctcttatgatatgtctggctgtgatattaatcggattttctgctgacattggatatgtattaggtgatacacatgagc

SEQ ID NO: 2056 - DNA, 293 bp, Glycine max
  Clone ID: 700555911H1
tttttttaaatctgcctagacccccttttcaacaagaggaaaaagaaacaccgaaaattaggcaggtaaaaaataggataaataaaataatatatacaaaagaatactatacagaaaaagaaaatgttaatatatacaaaataatggaggcagattagtgttagcaacactcaaacattaaaggctcaataatcacaaagccgatggatcgatcataatcagggactgatgagtgattagttccatcccatatgactgacactgaacctagccaccgaaattccaccatttct

SEQ ID NO: 2057 - DNA, 291 bp, Glycine max
  unsure (1)..(291): unsure at all n locations; Clone ID: 700555913H1
gtttggtataactttagccgaggtcnggaggagcactagctaagttcacaatttcaaaatgggctaggggactaaagaagcatttgaaaaggctcaatgctcctaagcattggatgcttgacaaactgggtggtgcatttgcgcctaaaccctctctggaccacacaaatcgagggagtgcctccccctcattcttattctgcgaaaccggctgaagtatgctctgacataccgtgaagtcatgctattctgatgcagcgccatgttcttgttgatggcaaagtcaggatg

SEQ ID NO: 2058 - DNA, 146 bp, Glycine max
  unsure (1)..(146): unsure at all n locations; Clone ID: 700555914H1
caacgtcttcccttctcttgctactngctatgntcatcttcaatanctgcaaccttactcatantgcatgnctgagccaaaacccaaacccaaccaccatggacatgattcctgggaagatccgaaaacgaggctgttcccctcgg

SEQ ID NO: 2059 - DNA, 291 bp, Glycine max
  Clone ID: 700555915H1
tgtttctctctcttcggtcagaaacatgaatttggaaacgcaaccaggaacggcgtcgtattggtgctacagctgcacccgtttcgtgcacctctctgtccaaagcaccatcgcctgcccccactgtcaaagcggtttcgtcgaagagatccggccggcgccggagccgaagcctcgccacgccatcgactaagtcctttccccgatgatcctcttttgctccggcgacagggcttccgccgccgtaggagagaagcttccggcaaccgctccccgttcaaccccgttatc

SEQ ID NO: 2060 - DNA, 291 bp, Glycine max
  unsure (1)..(291): unsure at all n locations; Clone ID: 700555916H1
acaacacataccctttttcgaatcaacgccactcgcccaaagaccaaactnnnnnnnnnnnnnnnnnnnnnnnnnnnnnnnnntcaacatttcacaactcaattttgcaatttcccctttcctttttctactgcccctcctctccctccctcttcgtttaacatcttccattcccttcctctctctgtgtattctagggttagggttcttctgactccacaatggccgtttcaaccactttctccgctcccaaattggaggccctattcctcaaatgctcttcctcctctt

SEQ ID NO: 2061 - DNA, 282 bp, Glycine max
  Clone ID: 700555917H1
cttttgcgtagtagaaactttgagtctttctttgaaactttttaagtcagagagtctttgttgagacgaaaaacaaaaaccatgtcatcatcaacaatacggagagatctagaaagtggaggggcgaacaagaacatcaacaacataagtacagtgccgctcccacttcctatgtttacgatccggaagttcattggacatcgtggctcgtgccgctgtttgtggcggttaacgttgtggtgttcttgtggtcagtatgtcaagattgccccaggaaaaact

SEQ ID NO: 2062 - DNA, 285 bp, Glycine max
  unsure (1)..(285): unsure at all n locations; Clone ID: 700555918H1
cttttgcgtagtagaaactttgagtctttctttgaaactttttaagtcagagagtctttgttgagacgaannacaaaaaccatgtcatcatcancaatacggagagatctagaaagtggaggggcgaacaagaacatcaacaacataagtacagtgccgctcccacttcctatgtttacgatccggaagttcattggacatcgtggctcgtgccgctgtttgtggcggttaacgttgtggtgttctttgtggtcagtatgtcaacgattgccccaggaaaaatct

SEQ ID NO: 2063 - DNA, 286 bp, Glycine max
  Clone ID: 700555919H1
agcgttgccattctcatcctcttctttctctctctaccattgccatggatccctacaagcaccggccatccagcgccttcaattctcccttctggactacaaattctggtgctcctatttggaacaacaactcctctttaaccgttggactagaggtccaattctgctggaggattatcatcttgtggagaagcttgcaaattttgatagggaacgtatcccagaacgtgttgtccatgccaggggcgctagtgcaaagggtttctttgaggtcacccatgacatt

SEQ ID NO: 2064 - DNA, 277 bp, Glycine max
  unsure (1)..(277): unsure at all n locations; Clone ID: 700555920H1
gtcaccttcttcttctactgtgttgtgattccccttacaatcctggtccctgaggttcatgttccaatctggggagctgtttatattccttctgtcatcaccattctcaattcagttggaacaccaaggtccattcacctnctgttctattggatcctctttgagaatgtgatgtctttgcaccgtaccaaggcaacatttataggtctcttagagtatgggagggctaatgaatgggttgtgactgaaaaacttggtgactctgtcaacaataata

SEQ ID NO: 2065 - DNA, 230 bp, Glycine max
  Clone ID: 700555922H1
gtgatggctgagtacgacctaactgccgcggatggcgccgaatctcgacaggcaccttgtgttccctctcctggagttcctgcaggagcggcagtctaacgacgacgaccacatcctgaaggcgaagatcgaccttctcaacaacaccaacatggttgactacgctatggacatccacaagagcctctaccacaccgaggacgtcccgaacgatatggtcgaccgccgcg

SEQ ID NO: 2066 - DNA, 293 bp, Glycine max
  unsure (1)..(293): unsure at all n locations; Clone ID: 700555923H1
gccgtaaacagatgtgaacggttccttcctccttcattgttcgcctcatcaacattacctccttcttccaccgtatcataggatncggaccactcctaacacgtttttgcctttttaattaattcctttctttttattcttcccttccctgagtcttccacattattttccttcntctcatcaagaaattttggtggcagaccctgtgagaaatattaaagacgggccactttcaaaatataccatggagccacaattagaatcccctttgggaagaaaagattctacaggaa

SEQ ID NO: 2067 - DNA, 293 bp, Glycine max
  unsure (1)..(293): unsure at all n locations; Clone ID: 700555924H1
agaaaagccaccttaacatctcttctctgaaaattctctttagagagatagagagaggaagaaagaatggcagcttgcactgtctactgcaacacaatctcanagcacaaattgctccatctcaaccccatcaaagacgcaactcagttttttcaccaaaagcaggtagttttctggaggaacagcaagaagggcagctgcagcagcagaagaagctatgtgataacatgtgcagcaggtgactcacagacagtggtgattggcctggctgcagactcagggtgtgggagagc

SEQ ID NO: 2068 - DNA, 222 bp, Glycine max
  unsure (1)..(222): unsure at all n locations; Clone ID: 700555925H1
tttctctctctcgtctcacttgaaactccacaacccaattttcttttcctatgacccaattcccaaatccaaatccaccaattctaattccattcttcaggagttgaattgaattcgtgatgaagagggaccacaaagatagctgcggcggcggggcgcncggagggactgtgaagggtgagtgttcctcaatgcagtcaaacgggaaggcgaagatgtggg

SEQ ID NO: 2069 - DNA, 291 bp, Glycine max
  Clone ID: 700555926H1
gaagttggaagtcatgggcagcaacattgatggcagcaacaacaagttctggtactcttaaagcaactcctttccttggccaaggcaagggtgccaatgccaatgctcttagggatgttgtctccatgggaactgggaagtacaccatgggcatgatttgtggtatggaccagacagagtgaaatacttgggacccttctcagctcagaccccttcatacttgaaaggagaattccctggggattatggatgggacactgctggcttatctgctgacccagaagcatttgc

SEQ ID NO: 2070 - DNA, 289 bp, Glycine max
  Clone ID: 700555927H1
ggtgatccatgggcgatgggccatgcttggagcactaggatgcatcaccccagaggtgctagagaagtggttgagagtggacttcaaggagccagtgtggttcaaagctggagcccaaatattctccgaaggtgggcttgactatttgggaacccaaaccttgtccatgcacaaagcatcctggcagtgctgggcttccaagttatcctaatgggccttgttgaagggtaccgcatcaatgggcttgatggggtgggagagggcaatgacctctaccctgggggccagt

SEQ ID NO: 2071 - DNA, 293 bp, Glycine max
  Clone ID: 700555928H1
ccacaattcacaaccgaaacagtttccatctctctcacaaaatgacaacaatatcaaattgctcccttctcttcctcttcctcttcctctccaccctccacatagcttccaccctctcaacccccaccaacttcatcaagtcctcctgcagcacacccagtacccagccctctgcatccagtccctctccgtctacgcctccaccatccagcaagacccccacgagctcgtccagacagccctctccctctccctcaaccacaccgaggccaccaaaaccttcgtcgcaaaat

SEQ ID NO: 2072 - DNA, 131 bp, Glycine max
  unsure (1)..(131): unsure at all n locations; Clone ID: 700555929H1
cagccactggcnccgctcttcatcttcaccagnccaacatggccanaatccagtgcggncacaaccannctaatactgttantncctgcctcctcctcatcataccaagatcnaattcccaacaagagtat

SEQ ID NO: 2073 - DNA, 291 bp, Glycine max
  Clone ID: 700555930H1
cgcatataaaatgcgaaaagaaatgaattcaatgttcggagatctgcacaggatctctctccgtgtccgttgaactttctttacgccctcctcgtaacataaaaattcagatcccgccaactctgaagacctctattctctttccctccccttccactttcccgagaaaaataaacttttccgtcaattttctctccacggtttccttcttcctcacaatggctccgaacttcgacaatcgaagattcgttctcgctcttcgcattttccttctcctctccttattcttca

SEQ ID NO: 2074 - DNA, 283 bp, Glycine max
  unsure (1)..(283): unsure at all n locations; Clone ID: 700555934H1
agttggaagtcatgggcagcaacattgatggcagcaacaacangttctggtactcttanagcaactcctttccttggccanggcaagggtgccaatgccaatnctcttagggatgttgtctccatgggaactgggaagtacaccatggcaatgatttgtggtatggnccagacagagtganatacttgggacgcttctcagctcagacccctngcatacttgagactagnattccatggggattatggntnggacactgtggcttatcttgctgacccnnaag

SEQ ID NO: 2075 - DNA, 173 bp, Glycine max
  unsure (1)..(173): unsure at all n locations; Clone ID: 700555935H1
gtcccgcagcatngaaaacctggtctggtncaacatgcataggtagttgagtgcagtgatttcagattgcntnnnnggctctnnntgcttnatntgcactcttcttatcagaaaccaagacaacaagagtttcacgttacttcatcatctctgtctctttgctacttctnttg

SEQ ID NO: 2076 - DNA, 284 bp, Glycine max
  unsure (1)..(284): unsure at all n locations; Clone ID: 700555936H1
agaacaagtagttgagaactaagaaggagaagcaaatggcttcctcaatgatctcttccccagctgttaccactgtcaaccgtgccggtgccggcatggttgctccattcactggcctcaagtccatggctggcttccccaccaggaaaccaacaatgacattacctccattgctagcnncggtggaagagtgcaatgcatgcaggtgtggccaccagttggcaanaagaagtttgagactctttcctacctgccagaccttgatgatgcacaattggcaaagg

SEQ ID NO: 2077 - DNA, 277 bp, Glycine max
  Clone ID: 700555937H1
ctcgctctgtctctctgtctctgtaaagcgcgtttcagcacccgttaccggcgacacatggagagggttatcggcgggaagtttaagattggtcggaaaatcggaagcggttcgttcggagaaatttatattgcatcaaaatggatacctctgagattgtcgccatcaagatggaaagcaagaagaccaaacatccacagctattgtatgaagcaaagttatatagtattcttcaaggagaaagtggtattccaagtatgaagtggtgtggcactga

SEQ ID NO: 2078 - DNA, 287 bp, Glycine max
  unsure (1)..(287): unsure at all n locations; Clone ID: 700555938H1
gctatgatgttaccgcctgtgaaaccaaggtgattcctggtgaatatggtntcgttgcncagcttaacgagggtcgtcacctcaagaagaggccaactgagttccgagttgataaggtccttcaaccctntgatgaaaacaaattcaacttaccaaagtcgggcaagaagaggtcctcttccaatttgaagctagcgaggatggacaagtccagttctttccaaatgctccagttgatgttgacaattctcccagctttgttgccatcaatgtcagtcctattgagt

SEQ ID NO: 2079 - DNA, 290 bp, Glycine max
  unsure (1)..(290): unsure at all n locations; Clone ID: 700555939H1
aaaagtaaaaattaaaacaaaaaggaatattatatccgatctatctcaattaaatatgagaaattgtaacttaaatgatncaaaattatacattagttaaaatataaagatttgaaacatatttaagtctaagattaattaaaataaattgatatatagtatgttattagtgttttgtaaaaagaggagtcttacatgacttaacttgatgacattaatttgtttctaacatctatgtgacactactaattcatgagtnatagagaattgaactaaagttcaaagaacat

SEQ ID NO: 2080 - DNA, 289 bp, Glycine max
  unsure (1)..(289): unsure at all n locations; Clone ID: 700555940H1
gtggtacttcaaaagatccccgtgggtcatctttgacaaaggaggggagatctacacgacgggactccccacatcatggagcattacataggcaccattcacctgttaaagaaaaacggagagaatatgtctgcaaggtattcccatcccgttggtagacattgagagggattacctcttattagataagcgatacccccgactctttgtctctcctgaattctccaaggttgttgtgaactggccanaggaaaaccttaaactgtctattcatactcctgtcagtttt

SEQ ID NO: 2081 - DNA, 291 bp, Glycine max
  Clone ID: 700555941H1
atcagaaacctgctgtagtgcgcgtagtaattcaaaatttgtggtaaagcaaatggcgaaagttttctgtgattttcggttccttctcttggttgccgctggcgtcttcatctatatccagatgaggcttttcgcaactcaatcagaatatgctgatcgcctagctgcagctattgaagctgaaaaccattgtacaagtcaaacgcgatcactgattgatcagattagcttgcaacaaggacgaattgtggccctagaagaagagcggaaacgccgagaccaagaatgtgg

SEQ ID NO: 2082 - DNA, 289 bp, Glycine max
  unsure (1)..(289): unsure at all n locations; Clone ID: 700555942H1
caagatcaaggaagaggatgtcgaaagaggatgtgnttgttggcgcgatcgancaaggaacgagcagcancaggttcataatatacgacgcgaagactggagtagtaggatgccaccacgtggagttcacccagttctacccgcaagccggtgggtggagcatgaccccatggagatcttggagagtgtgaaggtgtgcgtggccaaggccgtcgataaggccaccgctgatggcttcaacgtcgataaaggcttgaaggccattggtctcaccaatcagagagagacc

SEQ ID NO: 2083 - DNA, 289 bp, Glycine max
  unsure (1)..(289): unsure at all n locations; Clone ID: 700555943H1
caacatttgaagagctcanggctgaaggatgcatcactgattgcatgttgcttccttcagccataagaactcaacatttgaagagctcatgtcatgtataccacaaactcaataatatcttttcattgtcaaaacaacagtgctactttgaggtcctcacaacaatattaaagacattaaaacatagggagaaagagtgtcttcaaatgaatttacatgtctgtttacaatgtttatttctcagagatgtcttcaattttctttagggaaagaggtggaagcaacactt

SEQ ID NO: 2084 - DNA, 288 bp, Glycine max
  Clone ID: 700555944H1
gtttaaacctttcaccttcctccatactttcttcatctgggttttgcttgctataaaaatctagctaaaatttgtcgtttgctttcagcaagagctttagcttaattatcaccaggaatttatttggcagtcatggattattcatcatggtgattaacacttccttggatctcaacattaatccccacaggcttcatgaagaacttcccaaaaaggaggtggaaaacaactttttgtcattgaatttggaggtgaagaaatcttctgtaaaacaagagtctgctggtg

SEQ ID NO: 2085 - DNA, 289 bp, Glycine max
  Clone ID: 700555945H1
ctcttttgctgcatcagaggagttgtaaattaagagcatggctgcacaagctcttgtatcatcatcttctcttaccttctcagcggaggctgcaagacaaagtcttggaccaagatcactccaatctccatttggcttctccagaaaagctcctttcttgttaaggcagctgctaccccccctgtcaagcaaggatcagacagacctttgtggtttgcatcaaagcaaagtctttcttacttggatggcagccttccgggtgactatggatttgaccctctgggacttt

SEQ ID NO: 2086 - DNA, 287 bp, Glycine max
  Clone ID: 700555946H1
gtctgcttcatataaccaaactcttcactctgcttctgcttctttggaaagcacttaaccaaactctctgtttcagcttcctctgttttttgggtacgaacagagtttctctgtttttgacgatggccataaaggcgattgaactgttgaagggtgcggatcacaagaagaaataatggaagtgcttgctgcggtggcttcggatttgggggatgtgatcgatgatgtgaacaccttgcaggtgattccactgaatggtgcaatgaccaatgaggtttttcagataa

SEQ ID NO: 2087 - DNA, 287 bp, Glycine max
  Clone ID: 700555947H1
gactatgtgttttttgatgctttccatcccaccgagcaatggaacctactcaatgcattgacatcttataattctaccactaattcagccttcacttatccaatggatatcaagcaccttgttgatcatgaaattaagatggaattggactcacaaatgagtccacttcacaacttagtgccactgaataagttctggttatcatgtagtcgttcatatggagttgaaataattgtgagttgaatatgtattaagtaatggcctgccactgaattgaacgacaaagt

SEQ ID NO: 2088 - DNA, 286 bp, Glycine max
  Clone ID: 700555948H1
cagggggacccttagcctggggcttatgctacagcaaggaattgagtcctgataaattctactgcgatgactactataaattaacctacccttgcactcctggcgcagatactatggccgtggtgccatcccactttactggaactacaactatggaaaagccggggaagccttgaaggtggatctgttgaaccatccagaatacatagaacaaaacgccactctagccttccaggctgcactctggcagtggatgaccccaccagagaagcacctaccatcaccc

SEQ ID NO: 2089 - DNA, 281 bp, Glycine max
  unsure (1)..(281): unsure at all n locations; Clone ID: 700555949H1
gnatattctacaagtgatgatttngnngcaatgatgancctatntttggccatgcaagtnttgataattctaatnngctnnggtcctctaaagatgtgagtaaaaatgnagcacctttaccattggacacaccaagttcacaggtgctttaaggaacagaactgagcctttggaaatcaaagaagaatatgctcaatgtagtgatgaatcattggacctcaacaatgagaagattgggggtcctgcatcccaggttatagaaaatgcatgcacaatcacag

SEQ ID NO: 2090 - DNA, 280 bp, Glycine max
  unsure (1)..(280): unsure at all n locations; Clone ID: 700555950H1
ccatagctagcgtctccttgcgaaanatgaccataagcttacagtttaagggctttgtgaggatatgatctatggcacttntntcanagcttccangtcactgattttcanagcgtnagtgttgcagaagccattanattttcaataaaatnctcctccaagtgtnttcctacgangataagaatggaaagtaatcttaatcntagcatagagggcnacaataaagcgtctaggggtgccttngttgtcctagaaggctggatcgttctgggaagtcttc

SEQ ID NO: 2091 - DNA, 283 bp, Glycine max
  Clone ID: 700555951H1
ggagacgataaagaactttgcggtgatatacctggtggacataacggaggtgccggatttcaacaccatgtacgagctctacgacccttccacggtgatgttcttcttcaggaacaagcacatcatgattgatctcggaaccggtgacaacaacaagatcaactgggctctcaaggacaagcaggagttcattcgacattgttgagaccgtctatcgtggagccaggaagggacggggtctcgtcatcgctcccaaagattatccaccaagtaccgttactat

SEQ ID NO: 2092 - DNA, 283 bp, Glycine max
  unsure (1)..(283): unsure at all n locations; Clone ID: 700555952H1
actaattcgattaaatctaacgtacgtatncaatcaaatnaatacattatgtcagantttaganattctatgttgnaaatctttcttgtgttcttatnnatnacttgnttatatnatttaggaagagcggccccccctttttttgtaagacattgtcaganattcaaganacccatgaaatttataaaaaaggaacaanaatagatgtcgaaaaanatntgcnangagtacaaactatacnnaancaananngntccaacaataaangagggttttctttctc

SEQ ID NO: 2093 - DNA, 284 bp, Glycine max
  Clone ID: 700555953H1
cgctgggagttggagttggcaacgccttggtgttggagatcgtgatgaccttcggtctggtgtacacggtctacgcaactgccattgaccccaagaagggtaatttgggaattattgctcccatcgccattggtttcattgtcggcgtaacattttgttgggtggggccttctctggagcggccatgaaccccgctgtgacatttgggcctgctgtcgtgagctggacctggaccaaccactggatctactgggccgggcctctcatcggtggtggaatcgctg

SEQ ID NO: 2094 - DNA, 286 bp, Glycine max
  Clone ID: 700555954H1
gttgagaccaagacacactcgttcatatatctctctgctcttctcttctcttctacctctcaagtttttgaagtataaagatggcagagacattcctattcacctcggagtcagtgaacgagggacaccctgataagctctgcgaccaatctccgatgctgtcctcgacgcttgcctcgaacaggacccagacagcaaggttgcctgcgaaacatgcaccaagaccaacttggtcatggtcttcggagagatcaccaccaaggccaacgttgactacgagaagatc

SEQ ID NO: 2095 - DNA, 70 bp, Glycine max
  unsure (1)..(70): unsure at all n locations; Clone ID: 700555955H1
tcgctgtctctcccatccttnngcattctcaatacccttttgcatttgtganaggaaagcaaacatggtt

SEQ ID NO: 2096 - DNA, 290 bp, Glycine max
  unsure (1)..(290): unsure at all n locations; Clone ID: 700555957H1
caacaagcaacggtcacgcgcagttcacccctcttcacctggcgtcctctctgnatttccgacaaggatggcattttctctcaagcgctttcaaacgccgccggcgaagaatccgcgcgcgcggcggaggagtcatcaacaatgcactgagaagctgccgtctcagtctcctcttccggacgaggttcccgcgagcaatgccctcgtcaaagccatccgcagagcgcagactctgcagaagaaacgcggcgacacgcacttggccgtcgaccaactcatcctcggccttt

SEQ ID NO: 2097 - DNA, 286 bp, Glycine max
  Clone ID: 700555958H1
cttggttcaggagaatcaacaaattaacactagggagataatttcaatcatcaaattgtaaccatgccaatccgttcccgtgaacctgcacagaggccaggattgttagaccgtcaaagaccactacatgcagtccttggcggaggaaagcttgctgatatattgctatggaaagacaagatatcatcggcatcaatggtagctgggttctccatcatttggttcctctttgaagtggtcgaatacaatttcttactctactatgtcacatcctcatggccatatg

SEQ ID NO: 2098 - DNA, 286 bp, Glycine max
  Clone ID: 700555959H1
gaaggttattgcctcaagggtccccaacagcaaggtttccggtggaagcttcaagattgttgctgtagaagagaagaaagagattgaagagacccagcagaccgacaaggacagatggaagggtcttgcctatgatatctcagacgacaacaagacatcacaagaggaaagggtttggttgactcccttttccaagctccacaggatgctggaactcactatgcagtcatgagctcctacgagtacctcagcactggacttcgccagtacttggacaacaaaatgg

SEQ ID NO: 2099 - DNA, 286 bp, Glycine max
  unsure (1)..(286): unsure at all n locations; Clone ID: 700555960H1
ctcactaggagctcttctccattggttctncatctgcatgcacacacttgcatagttttggaaaccaagaatttttgaagggtagcatcaacaagaagttctggaaatggagatcaccaatgtcagcgagtatgaagctattgcaaagcgaagttgccaaagatggtgtttgactactacgcatctggtgcagaggaccagtggactctgcaggagaacagaaatgccttttccagaattttgtttcggccagtattcttattgatgtgagcaagatagacatcac

SEQ ID NO: 2100 - DNA, 221 bp, Glycine max
  unsure (1)..(221): unsure at all n locations; Clone ID: 700555961H1
ggctatcgcggtgcatggtngcgctggtgtcgaccctaatctcccactcgagcgccaagaagaagcgaaacaacttctcacgcgtgtctcaatcttggaatctctgctctaaattctaatcttcccgccatagatgtcgtcgaacttgtggtgagggaattggaaacggatccgctgttcaattcgggccgtggatctgccctgacagaaaaaggaacggt

SEQ ID NO: 2101 - DNA, 288 bp, Glycine max
  Clone ID: 700555962H1
gcagcatagccacgttgtggcgggccacgcgccaaacctgaaaaagaggaaatgctgtaatatcccaaaacaacgggacagagatagctcttcttcgatggcttccaaggcgatgagcgtggcagcagagaagatagggacggcggcgcgcgccaagccgtgtcgctaacggacgccgccgcctccagaatacggcagctactacagcagcgtcagagggccttcttgaagctgggagtcaagactcgcggctgtaacggcttatcctacaccctcaattacgcagat

SEQ ID NO: 2102 - DNA, 285 bp, Glycine max
  Clone ID: 700555963H1
aagacctcgaaacggagattcaaagtgggttgcctcacaaggactaccacgacccaccccccgccccattctacgaccccgccgagctccgaaagtggtccttcttccgagccctcatcgccgagttcgtcgccaccctcctcttccttacgtcaccatcctcaccgtcatcggctacaaccaccagacagccaccgccgccgagccctgcagcggcgtcggcgtcctcggcatcgcttgggcctttggaggcatgatttttgtcctcgtctattgcacgccggc

SEQ ID NO: 2103 - DNA, 102 bp, Glycine max
  unsure (1)..(102): unsure at all n locations; Clone ID: 700555964H1
gttatgacatttttgcaaaagcatagccgaacatgcagcaanaagagatccnatcttgagcncntgcagtgnntgaanatcnnggtctgcatcattgatggt

SEQ ID NO: 2104 - DNA, 280 bp, Glycine max
  Clone ID: 700555965H1
tatgtggatggcattaaggagttttctgtaccaaatgatggtggctgccaggaccaaatgctatttaagttcagatcttctggtctatccaggagacaaaaaactcaatttggttatgatagtgatattggtcaagatggatcgagagtgagaactcaagcacaaggacctcaacaaagagcaaaaggagacctgagaaaagatcaagaaggagatcatcctccatggaaaaccttggccttatggatattggatacatgatatattatcacaagcctgc

SEQ ID NO: 2105 - DNA, 279 bp, Glycine max
  Clone ID: 700555966H1
atttcgtttggcaaatgggtatgcagctttgaaagatgctctagcctctgaaaatgtgagatttcaaaggaaagctctcaacttgatccattacctgttgcatgagaataattcagactgcaacatcgtgaacgagcttgggttcttcgaatgttgatgcaccttgcctcaagtgaagattcagatgtgagagaagctgcccttcgtggccttctccagcttgctcacaatgcgaaagaggcaaggatggcaatgagaaagacagtgcgaaaataaagc

SEQ ID NO: 2106 - DNA, 283 bp, Glycine max
  unsure (1)..(283): unsure at all n locations; Clone ID: 700555967H1
aagaacaagaacaacaaagtaacgtgaaagagagagagatggaggcgattgttccagtggtggatttccagaggctttcagaggaagaggagcgcaagaagctgagaaaaacatgtgagaaaccagggtgtttcagaatcatcancactcaattccactaacactcatggctgacatgaagtcagtggttaaatacttgcatgaccttcccacgganatcaaaatgcgcaacaaaccctccgtccctgagagtggctatagggcggcaatgccaacaagtcct

SEQ ID NO: 2107 - DNA, 285 bp, Glycine max
  Clone ID: 700555968H1
ccggcgactgagtcgcggtctcttcccaactcggaactcagtccattccgcattttctcttcaaaccaaatttccttctgaagaaggagatttgaattcagaattgagtgagaagaagagaatagaaatgggctccgaattgattttcagaggccacgaggctcagcccgtggacgactcgtactcgccgaagccccacaagccctggttcaccgtgactcgcccgattcactacatgctccgcgagcagcgactcgtcttcgtcctcgtcggcgtcatcatagc

SEQ ID NO: 2108 - DNA, 283 bp, Glycine max
  Clone ID: 700555970H1
tcggcttccggcgagaggttggtgtcggcggcgagggacggcgatttggttgaggcgaagatgcttctggaatgcaacccttgtcttgcaaagtactcaactttcgggggtctcaattcccctcttcattttgcagcttccaagggccataacgagattgtggcattgttgcttgaaaatggagctgatgtgaattcgagaaattattgtgggcagaccgctttgatgcaagcttgtagatatggacatgggaagttgtacagacccttctgctcttcaaatg

SEQ ID NO: 2109 - DNA, 285 bp, Glycine max
  unsure (1)..(285): unsure at all n locations; Clone ID: 700555971H1
agaacaagtagttgagaactaagaaggagaagcaaatggcttcctcaatgatctcttccccagctgttaccactgtnaaccgtgccggtgccggcatggttgctccattcactggcctcaagtccatggctggcttccccaccaggagaccaacaatgacattacctccattgctagcaacggtggaagagtgcaatgcatgcaggtgtggccaccagttggcaagaanaagtttgagactctttcctacctgccagaccttgatgatgcacaattggcaaagga

SEQ ID NO: 2110 - DNA, 287 bp, Glycine max
  unsure (1)..(287): unsure at all n locations; Clone ID: 700555973H1
ggnatggggtgtcatggccagtcacagaagtggagagactgaggataccttcattgctgacctttctgttggtttggctacgggtcaaattaagactggagctccatgcaggtctgagcgtcttgctaaatataaccagctcttgagattgaggaggagcttggtgctgaagcagtgtacgccggagctaacttccgtacccccgttgaaccctactaaagttttcaagtggaaaaaacctggagatccacacgagtttgagcattgagatttgggtgcgcggtttt

SEQ ID NO: 2111 - DNA, 233 bp, Glycine max
  unsure (1)..(233): unsure at all n locations; Clone ID: 700555977H1
aaaaacgtgtggttatgtgattgtggaagagagaactgagacggcattgccaattctcccttgatctatgaaactgaccctgcaaatctgaggcacaatcggtagagattgtttcattttcataacaaaaaaaaaaagaacatttcagctctaagcctctaaccttatgagttttgagctggtttggtaaactgtgtttctcttccaatctattcccttngattccatnggtt

SEQ ID NO: 2112 - DNA, 284 bp, Glycine max
  Clone ID: 700555978H1
ctctgggggtccccaacctggaggcatgttcttcccagtgactcatggaatccatgctgtgaggcttggcaatgaggcctcaatctcccaaaatatcaaggtcaaacccggtcaactgtatgctctaattcttggggcctcaaggattgtgcacaggatgaagttttgaggatctctgtgcctccacagactggtgatgttcctttgcagaccctttatagcctcaatggtgatgttattgcttgggggtttaaggccacttctagtgttgtcaaagtgacttt

SEQ ID NO: 2113 - DNA, 282 bp, Glycine max
  unsure (1)..(282): unsure at all n locations; Clone ID: 700555980H1
cagtgctattgaggatgtaaggaaaagtctgaaaattaataagcaacagtttctccagtgttgggangttttgatctacattggccttaatcctgttgacaagaacatggagaactttgttagtattatnntgaaccgtgttaagatgntatcnnagggaaagnttcngnnacntntggntntntngnaccatccngaatacatagancaaaacgccactctagccttccaggctgcanatggnatngncgacccnaccagcagngcacctgaccatnncnc

SEQ ID NO: 2114 - DNA, 279 bp, Glycine max
  unsure (1)..(279): unsure at all n locations; Clone ID: 700555982H1
actgaaagcactcagtagggtttgcggtttcagagtttgtgacgcacgcatccatggccaccaccaccaacgccgccgcagccccgccgcgccagctctcccagaaggaagccgacatccagatgatgttagccgccgacgtncacctcggcaccaaaaactgcgacttccaaatggaacgttacatcttcaagcgccgcaacgacgggatttacattattaaccttgggaagacatgggagaagcttcagttagcagctagggttattgttgcattga

SEQ ID NO: 2115 - DNA, 167 bp, Glycine max
  unsure (1)..(167): unsure at all n locations; Clone ID: 700555983H1
aagaagnncttagctacaagctaaggaaggatcaaagagaatngctcaagcaatggcatacaatgantagcttacgtggttcctctcaggctgtgttggaangtagccttggctccacacgcttgaatgtggggagtggaagcaggtggcctcagtcacacgtgcag

SEQ ID NO: 2116 - DNA, 90 bp, Glycine max
  unsure (1)..(90): unsure at all n locations; Clone ID: 700555984H1
gggaaagcacccgtttaactcggagcnacccctccctcgnctgcatgcaccacggcttcatcaccccggtccccctgccactacgtccgc

SEQ ID NO: 2117 - DNA, 281 bp, Glycine max
  Clone ID: 700555985H1
ctcataggaaggttgacaagcctcgatttgtatctgcattctgtcaatcaaattgtggagatgttagtccaaatgtgcttggagcattttgcatagacactggattaccttgtgacttcaatcatagtacatgtggagggaagacgaattatgctatagccggggacctggctacccagatgaatttgaaagtacccgcattataggagaaagacaatttagaaaagcagtggatctttttaatgctgcagatgaagagattgaagggggcgttgattttc

SEQ ID NO: 2118 - DNA, 284 bp, Glycine max
  unsure (1)..(284): unsure at all n locations; Clone ID: 700555986H1
ctcaaactttgtaacttcaaaacatactcctctgttctctctgtttctcttcaatcttcctgaaaaaaacaaaaacacganaaatcatcnnnnnnnnnnnnnnnnnnnnnnnnnnnctttcaactaatatggcaattgaaaaccaaacaacactgtcagagaaatcaagccaaagaacaggagaatcatgggtgctggaggccctgatgatgacgacaataggtggccaccgtggttgaagccactgctgaaagagagcttctttgttcaatgcaagttgcatg

SEQ ID NO: 2119 - DNA, 285 bp, Glycine max
  unsure (1)..(285): unsure at all n locations; Clone ID: 700555987H1
catggaccgctgaagatggccccacaagaatgacatttaacgacaaacgagtggttaaatacaacatcttctctggaacttcaatgtcatgccctcatgttgctgctgcagctgttcttctcaaagccatacaccctacatggagactgctgctataagatctgccctgatgactacagccatgacaacagacaacacaggtcatccattgactgatgaaactggaaatccggcgacgcctttcgcaatggggtctggncacttcnnccccannananncagcag

SEQ ID NO: 2120 - DNA, 93 bp, Glycine max
  unsure (1)..(93): unsure at all n locations; Clone ID: 700555988H1
tcgtcaagaaggaaatcgatgaaacacctcttcacattaatactggtttacaactgccttagctgctnaacaccgggagtgaccanttctacc

SEQ ID NO: 2121 - DNA, 140 bp, Glycine max
  unsure (1)..(140): unsure at all n locations; Clone ID: 700555990H1
aaaattaatcatcttacttatttattctccgaaaatggttgatttacattggaaatcnatagatgccaagttccgacatgccttccaaaactctaaaactctctctctccgacaacaagtccttaccctctttgcaacta

SEQ ID NO: 2122 - DNA, 58 bp, Glycine max
  unsure (1)..(58): unsure at all n locations; Clone ID: 700555992H1
cttccttgccactgccagantgtcaccaccatggganaccgtcacancccaagcctcc

SEQ ID NO: 2123 - DNA, 283 bp, Glycine max
  unsure (1)..(283): unsure at all n locations; Clone ID: 700555993H1
atttatttatattgtgtgcttttgatcttggancaagacttcaattcatatacaccanagacacatactatcttcataagcaaaggactcaaagtaatagttttctacaaaaaaattgaagtttggggggggatctacatctctagggattatcactttccttactctcatcagcctgggaagaaatcgttagacattcactatntggtctgtctttgaacttcacttttggttccaaagatggggctatgattttgagatcaggtagcttcaagataagaga

SEQ ID NO: 2124 - DNA, 283 bp, Glycine max
  Clone ID: 700555994H1
gacagggataaatgcttacgtgatagcatttacagccctagccagtggaacctcatggcctgatctagtggcaagcaaaattgctgcagaacgtcaaaaaactgctgattctgcaattgcaaacatcacttgcagcaattcagtgaatatatatgttggtattggtgttccatggcttattgatactttgtacaacttcatagcatatagagaacctctccgaatccaaaatgcagggggactaagcttttcgttgattgttttcttctccacttctgtcggg

SEQ ID NO: 2125 - DNA, 286 bp, Glycine max
  unsure (1)..(286): unsure at all n locations; Clone ID: 700555995H1
gaaaaaaaaagcctacaccaccctcttcttccctattcccttctacttctggcgccatttngcagcttcaaaactnccatctttatttttcttctctccttccattattagaaacaccctcatggaatcagcagcaacagcattgnnnnnnnnnnnnnnnnnnnnnnnnnnnnnnnnnnnnnnnnnnnnnnnnnnnnnnnnnnnnnnnnnnnnngagcctcagccaatgaacatgaatgtcaacatgaacatgaacgtggtcaacaccacagaaggaacaacacca

SEQ ID NO: 2126 - DNA, 293 bp, Glycine max
  unsure (1)..(293): unsure at all n locations; Clone ID: 700556001H1
gtttaggccttagtgagaaggataacgccatttggttttggcttggaatacgtcatccactatgcaatgcaactgggctttgaaatggtgaaggagaccgaatactatgacgtgctgggtgtcagccctacggcatccgaagccgagattaagaaanttattacattaaggnacggcaagtgcatccagataaaaacccaaatgaccctcttgctgcacaaaattttcaggttttaggtgaggctaccaagttctgagtgacccagctcaaagacaagcttatgatgctcatg

SEQ ID NO: 2127 - DNA, 216 bp, Glycine max
  unsure (1)..(216): unsure at all n locations; Clone ID: 700556002H1
ctctnctctgtcccctccgccatggctgaggataaggagatgtctacctctgtcatcaatgggaatgattccctaactggtcatcatatctacaactattggaggcaaaaatggggaacccaaacagactatnagctacatggcagaacgggttgtaggaactggatcattggaatcgtttnccaggcnaaatgcttggaaactggggaggcatgg

SEQ ID NO: 2128 - DNA, 277 bp, Glycine max
  unsure (1)..(277): unsure at all n locations; Clone ID: 700556003H1
gcgtggcagggaggaagaaggtagtagagttgtccggcgacggcgcaattctttccggtgacggnacggtggtcgcgttttattagccaattncgtccactttttcccgcaacggtgnaattggaagcacaaaccatgtctgttctncgtcacaaaccgaagaacaagtctcaactaggaaaccaacaacactgtgtgaagnatgcaantcaaacccatcgaaatanacgtgccctggttgctccttacatcgtgcagtcttccatgcgtgaagtct

SEQ ID NO: 2129 - DNA, 287 bp, Glycine max
  unsure (1)..(287): unsure at all n locations; Clone ID: 700556004H1
gcgaagagaatggctcccaagggtttaatctttttgggctgtgttatgcttntccagcactgtcactgagtcgttgtcttgcggaggataatggacttgttatgaacttctacaaggaatcatgccctcaggctgaagacatcatcaaagaacagtcaagcttctctacaagcgccacaagaacactgctttctcctggctcagaaacatcttccatgactgtgctgttcagagttgtgatgcttcactgttgctggactccacaagaaggagcttgtctgagaagg

SEQ ID NO: 2130 - DNA, 285 bp, Glycine max
  unsure (1)..(285): unsure at all n locations; Clone ID: 700556005H1
ggaaacgtatagaaaaagcttttccaagaattggcaaaaagagaagaagggagagagattcatgttcatattttccccttcgtgcccgtcaagtttctgattctctttttcaattcctttctctttcaggtgattttntctccacgataaagtgcgatttcgccggtgtcgttttgccgcaagatggtgtcgttttcgggaatataaaatcagggttgaagttctttcttcagcattgaatctttggttacataggttggtttctttagaactcgattcaatttc

SEQ ID NO: 2131 - DNA, 212 bp, Glycine max
  unsure (1)..(212): unsure at all n locations; Clone ID: 700556006H1
tcctncagaacaaaaataggtcttcttcttctctgatctaccaaagcttcaaattctccttagtttggtttgtctgtnagttggagtgtaatgtcgccgccgacgctggtaacggaggaggaggggcggagaccgtggcgtccgattcttcgcaatccttggactgtttctctcagaatggtgctggattgaaagaacggaattattagggt

SEQ ID NO: 2132 - DNA, 284 bp, Glycine max
  unsure (1)..(284): unsure at all n locations; Clone ID: 700556007H1
ccgtggatgaagagataaaccagacagtaattgaaggaatgggagaattacatcttgaaatcattgttgatcggctcaaaagagaatttaaggtggangctaacgttggtgccccccaagtaaactacagggaaagcatttccaaaatctcaaagtgaagtatgtgcacaagaaacaatcaggtggacagggtcagtttgcagatatcactgtccggtttgaacccatggacccaggtagtggatatgagttcaagagtgaaatcaaaggaggtgtgtaccaag

SEQ ID NO: 2133 - DNA, 282 bp, Glycine max
  unsure (1)..(282): unsure at all n locations; Clone ID: 700556008H1
gccgggnatcaaatccgataactaccgtctcctcgccacggttgcggttgggttcgtcaagaccgtttccattttggtcgccacttttntcttggaccgggccgggcggcgcgtgttgctgatttgnagcgttagtgggctcatactctcgttttgactctgggcctgagtctcantgtngtggaccattcgcagaccacgctgaattgggccgttgggctcagcatcgctgcggtgctgtcctacgtggcaactttctctatcgggtctgggcccatcacg

SEQ ID NO: 2134 - DNA, 285 bp, Glycine max
  Clone ID: 700556009H1
caacaattcgattatacattgagcaatatgagaaggatccatcaaagattgggagactttcaaacgaagcacttgctcctgcttgtggaagttgcgttgaaactttcgaagatggaagaattcactggtcgatccgctccaacagtcattaatgaacacattcaagtggaaggtggttagatcctgaagcttctcccagtgcatttcatttcttctttgtccagtatcttacggatagccgaacagtagatttggttgtttgcagcctttgctatgggaaattga

SEQ ID NO: 2135 - DNA, 283 bp, Glycine max
  Clone ID: 700556010H1
aaacaaaatgactgtgttttggatttacaagacgttttcaagagattctcgttcgacagcatttgtagattctccttgcgggttggaccctatgtgtctggagctgtctctgcctatatcggagtttgctatgtcctttgacttggcgtcaaactgtccgcggagagagccatgtcggtgtcccctctaatatggaagatcaaacggttcctcaacgtgggctccgagaagaagctgagaaaagctattaaaatgattgacatcttagccagagaagtcataa

SEQ ID NO: 2136 - DNA, 283 bp, Glycine max
  Clone ID: 700556011H1
tgcaattgaagttgaagtcttgcccttctctcttcaactccaaacacaagacatcatcatccatggctgcctccgtcctccactgtcggagctgtcaacagagctcttttgaacctgaatgggtctggacctggggtttcagctcccagtcatccttctttgggagcagcttgaagaaggttattggctcaagggtccccaacacaaagatttcctctggaagcttcaagattgttgctgtagaagagaagaaagagattgaagagacccagcagaccgacaa

SEQ ID NO: 2137 - DNA, 284 bp, Glycine max
  unsure (1)..(284): unsure at all n locations; Clone ID: 700556012H1
gttggcgcgcaggtccgcgactccctcgtccagtccaacgctgaccccgacctcctcgccgccttcgagactggcggcgccganctcctctacgagatccgcctcctcagcncctcgcagcgcgtcgccgccgcacgcttcctcgtcgagatcggtgcgacgggaaggccgcgcaggagctcgcacgtgcaatgaaggatttccctagcaggcgcggggataaggggtgggagagcttcgactacactctccccggagattgtctttcttttatgtattaccgg

SEQ ID NO: 2138 - DNA, 286 bp, Glycine max
  unsure (1)..(286): unsure at all n locations; Clone ID: 700556014H1
gttntctagaaantaaaattacgcccaggattgtcagttttgctaacaccaganaattaatctgaatggtaaaaacagatgttttacatagacaaactgcctcatttgtttaaagatgaattatgactcatttaatttgtctcatttatttaaatgctcgtgcttacatgtacagacactattaaatgtnatttcacctatattgtataatattggtttgaatactaagattatttnnattattttttacataagatttcaaatacgagtttcatagacaaggaaa

SEQ ID NO: 2139 - DNA, 289 bp, Glycine max
  unsure (1)..(289): unsure at all n locations; Clone ID: 700556015H1
gcatgatatntgctttgcagcatccaaatcttgtgaaactttatggctgttgcattgaaggnaaccagttgctgctagtatatgagtacatggagaacaatagtcttgctcgtgcactttttggtaaagaanatgagaggatgcaattggactgcccagaagantgaaaatttgtgtggggattgcaaagggattagcttatcttcatgaggagtcaaggttgaaaattgtgcacagggatattaaggcaaccaatgtcttacttgataaacatctgcatgccaagatc

SEQ ID NO: 2140 - DNA, 286 bp, Glycine max
  unsure (1)..(286): unsure at all n locations; Clone ID: 700556016H1
cacnacatagtaaccngcttctntctctttntgctgtgctgtnnctgtntnttncnatgtccatctgataaccctttcctggantctntntcgtggttgttgctattctgagtgatgggtatgccctgccgntgttcccacacctcccacacantgaaatcatcatcancagcttcttncgccacaagtcttagatcaacaatttncgtcaattattccaaaaccaccttaagagccttttccaaatggccccttaaagatcgaacttggtcggagtaaacatggc

SEQ ID NO: 2141 - DNA, 286 bp, Glycine max
  unsure (1)..(286): unsure at all n locations; Clone ID: 700556018H1
caatttttctctcaaccggnccaatttagcataagcncagcatggccaccgcaacagcagcagccacctcgtaccttnatggggacgcgcctcctggaggcccactccggggcggggcgggtgcaggcccggttcgggtttggcaagaagaaacngccgccccgaagaaagtttccagngggtcgggctctagctccgataggcccctgtggtatccgggcgccaaggcgccgagtacctggatgggagccttgtcggagactacggattcgacccatttgggtag

SEQ ID NO: 2142 - DNA, 277 bp, Glycine max
  unsure (1)..(277): unsure at all n locations; Clone ID: 700556019H1
tgcctgcaacagccttgatcatgaccctgatctgcagcacatgccggtgcttcgncgtgtctcgcggttnttgcaattcgataacttctcatgtcctatgggaggaagttggagtttgatttcattgcaaggttcttgatctgcaccagcacttcactttttacccggttatgtgtgttgccagggtcaacttgtatctgcagaccattctgctattgttttcgaggcgtaaagtgcaggatagagccttgaacataatggggatccttgtgttttg

SEQ ID NO: 2143 - DNA, 284 bp, Glycine max
  unsure (1)..(284): unsure at all n locations; Clone ID: 700556021H1
attattaattactaaggaactctcccagaaaagaggcatcagttngcaatggntcgttacggtgagggcgacaagcggtggatcgtggaggaccgccccgacggcaccaatgtcnacaactngcattggtccgagaccaactgcctcgactgtccaagaccttcttcaccagcctcctcactaacctccctatcctcgacggcgagggtaacctcttcntcaaaacgacgtcgcttcgctccctcgacggcgaggcctacatcaatgtccgaaaggggaagatc

SEQ ID NO: 2144 - DNA, 282 bp, Glycine max
  unsure (1)..(282): unsure at all n locations; Clone ID: 700556022H1
gaanagataagaggagagccatcttatatcagcaatatgttaaaggtatatcaacanctgggatgcaatctaactatggtttcgatggtcaactcaatgcatgttggacacataaaatgactgnaacagagattgaggtgatcaaatctnaggttttcttgtttcagtcatccatggcaggcatgatataattgctcagatatattatgcaaaaagacttggctgaaaggcttcatccagtggctagaatggtagatcttcacggaggtcatttagtaagtc

SEQ ID NO: 2145 - DNA, 208 bp, Glycine max
  unsure (1)..(208): unsure at all n locations; Clone ID: 700556023H1
caaaaaatggctgaaactctaaacctcccattgctactctcagtntgcatcatcttcacaaccctctnctcttacaacctntcgcacgatcacaaccccatcacacaccaatgttctcgatgtctnttcttctctccaccaagcccaccaatcctctcnttcnncccanaacttctagaagagcaatcttcagaaacagaaactccca

SEQ ID NO: 2146 - DNA, 263 bp, Glycine max
  unsure (1)..(263): unsure at all n locations; Clone ID: 700556025H1
anattaagtctctgcattattntcttnccttttntatctccctctgncaaaaacnnagtanatgggtcggcttaatctcctacttgtgtggtcactctctttaacacttttccttaattatctanacccaactctgcccagctcagtcnaaaccactatgctaacatatgccccaaccttgaaagcatcgttagacaagccgttactantaagttccaacaaacctttgtcaccgtcccaggcanccttcgcctattctttca

SEQ ID NO: 2147 - DNA, 282 bp, Glycine max
  unsure (1)..(282): unsure at all n locations; Clone ID: 700556026H1
gtttgctgagannaaganaggtngaggtgntggtgactcagaggggangcatanagtggatgctgtgattggttntgcttctggtgatgggtgngtcccagcaggccataacatctccgcggagcaggaagcctcttaaggtgncgatgaggccatgattaggggaattgagaagtacatgcgaagtggaagtncangangganaagaagaagcccgnccnaatgtaactgcttggcataatgttccacgcccggaggngannttaangtnttngtctgctc

SEQ ID NO: 2148 - DNA, 280 bp, Glycine max
  unsure (1)..(280): unsure at all n locations; Clone ID: 700556027H1
ccaaggtctctgattttnggctagccaaattagctcttgatgcanatacanatataaccactcgtgtnatgggaacttangggtatatggcccctgagtatgcgtcaagtggcaaattgactgagaagtctgatgtatattcttttgggtcgtgcttttggagctaattaccggaaggaagccagtagatgcatcccaacctttgggagatgagagcttagttgaatgggctcgacctttactgagtcatgcactcgacactgagncatttgatattttg

SEQ ID NO: 2149 - DNA, 282 bp, Glycine max
  unsure (1)..(282): unsure at all n locations; Clone ID: 700556028H1
atatactacgcctaanagatcccaacaggcctttccccactggtcaagccagtgatgctggaggtgttggtcttttaaagtggagaatgcaaagtactgatgagtcaatggtgccgctgacaatcaactgttggccctcttcttctanaacgaaacttatgtcaacattgaatatgaggcttcatcaatgtttgatctgcggaatgttgtgatctctgtacctcttccagctcttcaagaagcaccatctgttaggcagattgatggggaatggaggtatga

SEQ ID NO: 2150 - DNA, 281 bp, Glycine max
  unsure (1)..(281): unsure at all n locations; Clone ID: 700556029H1
ttttcaattccgtgtgcccactcacttcatcaganngaccacgcctaaatcccanttcccaaattcctcccattagggnnnnnnnnnnnnnnnnnncanttcatgttctcttattcttgattgattctctctattcgattcgattgttcttggaaccgcagcttcagcccaagctggaccccgcgccggaggttgttagcggtggcggtggggattcggagaagtcgcatgtcagtnatgtcaccgaggttcgcnacgttgacntggcgcagcaaacggcg

SEQ ID NO: 2151 - DNA, 288 bp, Glycine max
  unsure (1)..(288): unsure at all n locations; Clone ID: 700556030H1
cngtttngggggcagaaatccagcancaatggtgtacgtcaaggntcanatatnnacangcntacttcnaganatatcaagtcangttcaagagntgtgagagggaaaaaccgattaccgtgccaggattcggttgattnatcaggacaagacaaatatnacactccganntaccgatttntgnttcgctntagcnnnaaggncattgttncncaaataatatctgctaagcattgccggngatttagttcttgctacagcatattcacatgagctgcnacgatntgg

SEQ ID NO: 2152 - DNA, 287 bp, Glycine max
  Clone ID: 700556031H1
gtattggtggtcctgaaggtcatcctggtcaacaaacatttagtgggcacatttagcattcagaaatataaatttggatacaaacttgtgttctgtatcactggctcaggcacttgtttagatattggaaggtttgatgccaaaaatggtgaggaggaagacgtttgaatctcactgagcatgaggccttcgacattgttttcatagaagcttctaaggttgatggaatatcaagtccgtagtttgaatcaaatcaaataatgtcaagggtagctagatagtgttga

SEQ ID NO: 2153 - DNA, 295 bp, Glycine max
  unsure (1)..(295): unsure at all n locations; Clone ID: 700556032H1
tagaaattgaggagattganttacaatagcaatgagtgtgtcttcaaattcgaaggaatcgatggaattatgcatatttgcatttgcggagaggccaacacgaaggccaagagctccgataagattctcttcttcttccccgccggtttgccctttnaaagcaactctccgtcattggcctcagcgaaggactcatcactttcactagaatcttctcgccagangctggcctgcnnacgtcatcgaagcagaaagacattctcatgttttctacgangccgaacccgatatctgg

SEQ ID NO: 2154 - DNA, 289 bp, Glycine max
  unsure (1)..(289): unsure at all n locations; Clone ID: 700556033H1
ctataagctagtttatcgtgaggagaatatgaagttgtttgttttctttgttgctgcagtagttttggtagcatggccatgccatgggcgcaggctaccaaaggttccctctccgaatgaaaactggctatggtgagcgttcttcggaggtaaatgcgcaagttttaggcttgctgtggaagcacacaacatccgagcctttaaaaccattcctgaagngtgcgttgaaccaacaaaggactacattaatggcgaacaatttagatcagactctaaaacagttaaccaa

SEQ ID NO: 2155 - DNA, 287 bp, Glycine max
  unsure (1)..(287): unsure at all n locations; Clone ID: 700556034H1
cttntccattggttcttcatctncatgcacacacttgcatagtattggaaaccaagaatttttgaagggtagcatcaacaagaagttctggaaatggagatcaccaatgtcagcgagtatgaagctattgcaaagcagaagttgccaaagaggtgtttgaactactacgcatctggtgcagaggaccagtggactctgcaggagaacagaaatgccttttccagaattttgtttcggccacgtattcttattgatgtgagcaagatagacatcacaactactgtnct

SEQ ID NO: 2156 - DNA, 276 bp, Glycine max
  unsure (1)..(276): unsure at all n locations; Clone ID: 700556035H1
aatacatgaggaaaaatggcgaaaaggaggtcagcccaacatcaaagaaaagaaagtnctgnnnnnnnnnnnnnnnnnnnnnnnnntttgatgggaantaacaatggaaactcagagagcagttctactgatgaagagtcttcaagaaaccaagggaggaaaccatcaaagcaaaaatttcaagagtttatgtcaggactgaatcatctgatactagccttattgtgaaagatggataccaatggaggaaatatggacaaaaggtgaccagagata

SEQ ID NO: 2157 - DNA, 285 bp, Glycine max
  unsure (1)..(285): unsure at all n locations; Clone ID: 700556036H1
aaacaagcccttatcacaactctatctaacaaattacataggacaggcccaaaaccanaaaaagcttctttgtctgctcgtngccgattctnccaccactattcccttcaccccaatcacactttccggtagttgttgctattagtgtagaaatgagtacgctggatgcaacaagggctgaacttggtcttcttgttttatatttgggcaaggctgaagcaagggacaaaatatgcagggcaatacaatatggttccaaatttttgagtaatggggaacctggta

SEQ ID NO: 2158 - DNA, 283 bp, Glycine max
  unsure (1)..(283): unsure at all n locations; Clone ID: 700556037H1
ctccatttccatttcctctctctcagtttccaagaatcttaagctatgggaaagtcttacccaaccgtgagcgctgattaccagaaggccgttgagaaggcgaagaagaagctcagaggcttcatcgctgagaagagatgcgctcctctatgctcctggaagagaggacaaacctgagccaccaccagagggtcgcttgcccgatgccactaagggttctgaccatttgagagatgtgtttggcaaagctatggggcttagtgaccgagatatcgtngctctg

SEQ ID NO: 2159 - DNA, 96 bp, Glycine max
  unsure (1)..(96): unsure at all n locations; Clone ID: 700556039H1
cttttcccggagggctggacatgtcagatactttctatcncaatgattaatggaggattaccaatgtgggaaagctatccagttttttcaactaag

SEQ ID NO: 2160 - DNA, 279 bp, Glycine max
  Clone ID: 700556040H1
gttcattcaaattattaagagaacacaaattttgtgctaggaatatcttcttttactcttgttttgtgaaattaaaatagtgttaccgttgtgtgctgtgacgaggcaattttatggactagagtttctgatctgggaactttctcaaaattgattatcaaacccttggctgtctgagcatactgaattaaatttgtcagattttttataatttcgtttttgaagatttttaatgtggtctacttaataatctcattgttagctttaaattttgttcca

SEQ ID NO: 2161 - DNA, 120 bp, Glycine max
  Clone ID: 700556041H1
gtagttttatgttcattagttaaactcattggagaaagcgattcatggcagcaaaaatgctggcacctattcttctccttagataaacatggcagttatatataaaacatcgtgcattat

SEQ ID NO: 2162 - DNA, 279 bp, Glycine max
  unsure (1)..(279): unsure at all n locations; Clone ID: 700556043H1
gtaattatgatgtttttgtcaaagctgagggtggtggcctgtctggtcaggctcaggcaatctctcttggcattgctcgtgccttgctgaaggtgagcgaagatcatagagtacctttgagacaggaaggacttcttacaagagatncagagtggttgagaggaagaaagttggtctcaagaaagctcgtaaagcccctcaatattccaagcgttgaggttgggatgttacatgtatggtctgtcttttctttcctcctggtgtctctggaaatgagtt

SEQ ID NO: 2163 - DNA, 279 bp, Glycine max
  unsure (1)..(279): unsure at all n locations; Clone ID: 700556044H1
tttcggtctcgaacgntgaatcaggcaccacattnacnnatcagcttttttgtgangattccaaagcatggcttcccatgcagnatncactgctggtgnttccctggcatgtcagnnatgnttgggnaaccccatnaacctcagtgtgccacaaggccagctccatctgcctctagccctgcctccttcaagantgtggctcttttcnccaaaaagaaggctgcacctccaaaaaaagctgnagctgctgntcctgccaatgatgagcttggcaagtgg

SEQ ID NO: 2164 - DNA, 282 bp, Glycine max
  Clone ID: 700556045H1
ccgcaagaaccgttctttggaaagtctgcaagctaatgtgcagaggctgaaaacatacaaggccaaattggttgtgttcccaagacgggcacagaaggttaaggctggtgattctactcccgaggagcttgcaaatgcaacgcaagtccgggttctttcttgcctattgtgagggagaagccaactgttgaacttgtaaaggttacagatgacatgaaggcttttaaagcttattacaagcttcgacttgaacgcacaaacaaacgccattatggtgccaga

SEQ ID NO: 2165 - DNA, 263 bp, Glycine max
  unsure (1)..(263): unsure at all n locations; Clone ID: 700556046H1
cganacccttnctgttagggatgancttcttagagctcttctgaattctgaccttattganttgcatacttttgattatgccaggcatttcctctcctgttgcagcagaatgcttggnatttcttaccatccaagcgtggctacattggccttgagtactatggaagaacagtaagcattaagattcttcctgttggtattcatataggtcagctccaatctgtcatgagtcatcccgagacagaaagcaaggttgcagagtt

SEQ ID NO: 2166 - DNA, 289 bp, Glycine max
  unsure (1)..(289): unsure at all n locations; Clone ID: 700556048H1
ctcatcttcatctgcatctgcccatgtttcttgtttctgtctgcaattttcaattccaactctcttctcacatggcaattctccatccaacaaaagtttctcatcatttctgtttcccataagcaattaattaaaatactgaatttggtataattctttctcaaatataattagttttacaattattttatttctttttccttggattgnagccggggtttcttgttgtgagagaaaaacctttattctctgttttgggaacatctggggtctcaatttagtggaagtt

SEQ ID NO: 2167 - DNA, 284 bp, Glycine max
  unsure (1)..(284): unsure at all n locations; Clone ID: 700556049H1
gtaattatgatgtttttgtcaaagctgagggtggtggcctgtctggtcaggctcaggcaatctctcttggcattgntcgtgccttgctgaaggtgagcgaagatcatagagtacctttgagacaggaaggacttcttacaagagattccaagtggttgagaggaagaaagttggtctcaagaaagctcgtaaagcccctcaatattccaagcgttgaggttgggatgttacatgtatggtctgtctttctttcctcctggtgtctctggaaatgagttacattt

SEQ ID NO: 2168 - DNA, 287 bp, Glycine max
  unsure (1)..(287): unsure at all n locations; Clone ID: 700556050H1
gnctgatgaagtntctttccttgatactncantttgtatcacaaaggcagnggcaaatccagangtagtgnttngaaatngcgaatngactacnttcgcactnttccgtggcncgaattctgtnacancagcangttgttacctntgcccgatcctggttctagagggtccaaantcnnngtctgctgtggnatctaatggttgnnctgttccncatnaagattgnaccactttgagncacaatctcaaggncaacntgggtgtngtgttgccaangagttagaaaa

SEQ ID NO: 2169 - DNA, 282 bp, Glycine max
  unsure (1)..(282): unsure at all n locations; Clone ID: 700556051H1
ggnagacggtagcagataagcctaaacacgaaactcgcaaattccctcaacactggagtcgctggaaaattcattctgggactcaggttacgtttctcccttcctcaatattccatttttctcattctaagaaggcactgcataatctcgtcattatctcacaatgcgattcggatccttaaatcgttgcttggtttgaaccaaacgataagcagtgatatgattatgatgttgtgtatttttaattatttatttgttatctgtttccgtcatatctttcaa

SEQ ID NO: 2170 - DNA, 285 bp, Glycine max
  unsure (1)..(285): unsure at all n locations; Clone ID: 700556052H1
catttggtacggccacntcaaaccttcccaganggcaatagtctccgatttnatcanctcgctgtcancctacatgccctncacagcacccaancatccgtcgccacgtggtggnaaaccacaganaaatactancaccacctcagtantctanaaaaacctcccctctttcaattncactcaataaacagnttctcgacgaaaactactcgctcggcaaatccctnacgagcaagcacctcattcagctagcttcanagggtgaccacaaaaacgccatcaacg

SEQ ID NO: 2171 - DNA, 281 bp, Glycine max
  unsure (1)..(281): unsure at all n locations; Clone ID: 700556053H1
gcagaacgaggagaagcagaaggagcaaaagcaatggcgccgaagaagccgagaaccacgacaaggaaccctgatttggttagggggattggcaagtattcgaggtcgcagatgtaccacaagaggggcatctgggccatcaaggccaaaacngtggcgttttgccccgccacgatcccaagcccaagcccgaggccccggcccagaagccgcccaagttctaccccgcggacgatgttaagaagcccctcgtcaacaagcacaagcccaaacccgcgaaa

SEQ ID NO: 2172 - DNA, 280 bp, Glycine max
  unsure (1)..(280): unsure at all n locations; Clone ID: 700556054H1
aacaaatcaaagccatggccacctccaacttctctattgttctctccgtctccctagccttctttttggtgctacttaccaaggcacactcgaccgataccgtttctttcaccttcaacaagttcaacccagtccaaccaaacattagctccaaaaagatgctagtatttcatcctctggggtgttacaactcaccaaagttggcagcaacggcgtgcccacctcgggatctctcggtcgtgccctttangctgccccaatccagatttgggacagcgaa

SEQ ID NO: 2173 - DNA, 223 bp, Glycine max
  unsure (1)..(223): unsure at all n locations; Clone ID: 700556055H1
tcaagttcaagattgtcaattcgtcatatttttagaataaagtgtaacattttaaaatcattaaattggncaataatgtgtaacattttaaaatcattaaattggaattccaagtgacagccacttatccctgccactcaaataaacattctcaaatgttacacattattgttcaagttcaagattgtcaattcgtcatatttttagaataaagtgctgatga

SEQ ID NO: 2174 - DNA, 279 bp, Glycine max
  Clone ID: 700556056H1
cgacagaagagctatcagggtcagaagatggtagccacatttttgaggcaattggtttattgattggaacagaagatgtcctgcctgaaaagcaatctgattatctatcttctttgctcagtcctctttgtcaacaggttgaggcatgctcataaatgccaagttattgaatgctgaggagactaatgccaaaattgctgtaatccagcaaattattatggcaattaattctctcagtaagggctttagcgagcgtcttgtaaccgctagtcgccctgc

SEQ ID NO: 2175 - DNA, 277 bp, Glycine max
  Clone ID: 700556057H1
gtagctatgccatatctggtgcagcatgctccgagctcaatgggaaggtcacttccgtggcctctgttgcatcctctggctacaagttgccattgatcaaatgtgaggccagagttcccaaagccaaagaatctgaaggaaggagggtgcccttgttctcttggcagctacccttttcatctctgcagcctccaattcttctgccaatgctgggatcattgatgattaccttgagaggagcaaggctaacaaggaattgaatgacaagaagaggtta

SEQ ID NO: 2176 - DNA, 278 bp, Glycine max
  unsure (1)..(278): unsure at all n locations; Clone ID: 700556058H1
ggacaaatggaaacattagtgaggtccaatcctggttcccccctgcacagtggatcagcagtttgtttgtggagctggagccggagttgctgtttccattcttgcctgcccaactgaattgatcaaatgcaggttacaagcacaaagtcgcttgccggctccgaaacanctaccgtggctgttaagtatggaggacctatggatgtggccaggcatgttcttaggtcagaagggggcgtgagaggtcttttcaagggcttggttcccatatgggacgt

SEQ ID NO: 2177 - DNA, 278 bp, Glycine max
  Clone ID: 700556059H1
atgccaccctcatgaacattgctgataaccccaccaatgtgcagcttcctggtatgtataacaaggaagagaatccccgtgtgcccatcatcgtcaccggtaacgatttctccacactctatgcgcctctcatccgtgatgggcgttggagaagttctactgggcaccaacaagggatgaccgcattggtgtctgcactggaatttttcgcaccgattcaattcctgaacaggacgttgtcaagattgttgacaccttccctggccaatccattgatt

SEQ ID NO: 2178 - DNA, 279 bp, Glycine max
  unsure (1)..(279): unsure at all n locations; Clone ID: 700556060H1
cggtcgtttgcncggcggcggcgtgtgctcncngtggcgctggtggtgcgccancgcatgangagctccggaaagtggggtcgcgtggtggctattgtgaaacagtttgaggagcagtgtaggaccccaattgggaagctacgacagttgctgacgccatggacgttgagatgcacgcgggtcttgcttctgaaggtggcagcaagctcaagatgttgatcacttatgttgataatctcccttctggggatgagaaaggactcttttatgcattagacc

SEQ ID NO: 2179 - DNA, 282 bp, Glycine max
  unsure (1)..(282): unsure at all n locations; Clone ID: 700556061H1
gcgatggcgcctccgaagctcttcgtctttgcgctttctgtaaccctaattttcgccatcgttggggccgaagccgatatttccatcgaaggaagcactccagagcctgatacctccgccatcaggatccaattagatcaactcaatncaagatccaaattctcgagtctcaaatcagcgaaaagttggaagaagtgaagaagaaggacgaaattatagcagaaaaagaaaagtccattgaagataaatcaattaccatacaatccttgcagaatgagattg

SEQ ID NO: 2180 - DNA, 283 bp, Glycine max
  unsure (1)..(283): unsure at all n locations; Clone ID: 700556062H1
gcagaacgaggagaagcagaaggagcaaaagcaatggcgccgaagaagccgagaaccacgacaaggaaccctgatttggttagggggattggcaagtattcgaggtcgcagatgtaccacaagangggcatctgggccatcaaggccaaaacngtggcgttttgccccgccacgatcccaagcccaagcccgaggccccggcccagaagccgcccaagttctaccccgcggacgatgttaagaagcccctcgtcaacaagcacaagcccaaacccgcgaaatc

SEQ ID NO: 2181 - DNA, 277 bp, Glycine max
  Clone ID: 700556064H1
tgggattaatttcccttaaattttataggatgataatgatttgttgatggctaattgttagaaggtagaagctaaggaagtagtgtgggaatatggtagttaaaaaagccaatggtctgatggattcaatttaaaattcattagaccttttggagtactatgaaggaagacatcaagagaattcatgaagaatttcatgctcatggtgtgatccctagaggttgcaactctttttttgcccttatttctaaagtagatgatcctcaaggcttagggg

SEQ ID NO: 2182 - DNA, 284 bp, Glycine max
  unsure (1)..(284): unsure at all n locations; Clone ID: 700556065H1
ggcttcangaagagaatctcaatggaggcccaggagctgaagcgcgtgttccagatgttcgaccgcaacggcgacgggagaataacgaagaagganctgaacgactcgctggagaacctgggcatcttcatctctgacaaggacctgaccaaatgatccagaggatcgacgtcaacggcgacggttncgtggacatggacgagtttggggagctgtatcagaccataatggacgagcgcgacaatgaggaggacatgagggaggccttcaacgtcttcgaccag

SEQ ID NO: 2183 - DNA, 282 bp, Glycine max
  unsure (1)..(282): unsure at all n locations; Clone ID: 700556066H1
gtccggcatcaaaatcantctccanactctgctnatgtcagggnaggagaatattggcggancantcgaagaancagagtgcattggagtggaacaacatttgaacaagttgaaaattgaactgctcaangatggcatgtcggtcctgtcttgactggtttgccnagatccggcaaaaccacactggctaagaagatctgttgggacactgacatcaaaggcangttcggggtaaacatatttgtcacagtctccaaaacacccaacttgaagagcattgtg

SEQ ID NO: 2184 - DNA, 282 bp, Glycine max
  unsure (1)..(282): unsure at all n locations; Clone ID: 700556067H1
gtaactcttcagattttggttttttgttccctatccgctntctcttattcacttcttgaacatggcggtggcaccttacaccaccggttccgcacctcgtttttctcctcctnctacttgtagtgttggccacaaagctctattccgattgaaacttcaagctgacgagttctttccgagcggcaagacctaacgtaancgctgaattttatggaaaagttcacaacactcttcactgtcggtatgctaaccacaatccatcaatggcacgtattcgaatga

SEQ ID NO: 2185 - DNA, 280 bp, Glycine max
  unsure (1)..(280): unsure at all n locations; Clone ID: 700556068H1
aaaatnatttgcttctgctctctgtctttctcacaagacaacagaggaacactcccaaacaaaccatggacgtgggtcagatgcagagacagtggatcgactacaccaaatccctcttcctcgagggcttcctggatggtcagtttctcaacttcagcagcttcaggatgagaacaaccctgactttgtggtcgaagttgtctctctcttntttgaagattctgaaaggcttctcaaagatctcacctttgccctagatcagaatggcgttgattcaaaa

SEQ ID NO: 2186 - DNA, 280 bp, Glycine max
  unsure (1)..(280): unsure at all n locations; Clone ID: 700556069H1
caacgttagtgaaccaacccaacacacaaagcaagagaaaaaagtatctcaatgcaatcaacaagagctcactttcataaagacacgcacacatattcttgttacacaaaatggaccaacaagagggtaacacgtggacaatgccacgttctgggcggttgancagcgaaaccgccgccgtcttcgccgctcttactctctgttgctcacctccacctccctcctcgtactcttcntcgtactcgtnctggtgtnctcgctcatcgtggttccnacgttg

SEQ ID NO: 2187 - DNA, 279 bp, Glycine max
  Clone ID: 700556071H1
aagaataccccctcttttgctgcatcagaggagttgtaaattaagagcatggctgcacaagcttcttgtatcatcatcttctcttaccttctcagcggaggctgcaagacaaagtcttggaccaagatcactccaatctccatttgcttctccagaaaagcctcctttcttgttaaggcagctgctaccccccctgtcaagcaaggatcagacagacctttgtggtttgcatcaaagcaaagtctttcttacttggatggcagccttccgggtgactat

SEQ ID NO: 2188 - DNA, 276 bp, Glycine max
  unsure (1)..(276): unsure at all n locations; Clone ID: 700556072H1
ttcagatcaaacgcacacagttacgctcttcaaatcaatctcttctcagaaatnggtgtggctcaaaacattcccgatgcggaggagggaaccttggagattggaatggaatacagaactgtgtctggagttgctgggccattgtcattcttgataaagttaagggacctaagtttcaagagattgttaatattcgcttgggagatggaactactcggcgtggacaagtgctagaagttgatggtgaaaaggctgttgttcaggtctttgagggta

SEQ ID NO: 2189 - DNA, 276 bp, Glycine max
  unsure (1)..(276): unsure at all n locations; Clone ID: 700556073H1
gttaatgtttaatttcttatattttcttatntgttttctgtttgaaaatctggttgccttgttaacttacttagtgctgttagattattcatgnacatgctgattgggtaatattgctgcctattcttttgtcattattcagtatcanatttttttcttgtgactgagctctgcaaatttataggtcaattacttcccttcaaggtatgatcctgttcgtcatgcagaaaggttccccatacctcctgctatctgcagtggaaggcgtgaaaagtg

SEQ ID NO: 2190 - DNA, 172 bp, Glycine max
  unsure (1)..(172): unsure at all n locations; Clone ID: 700556074H1
cacgattcagagatttggttcgctgcctgaaacctaatggctccgaagcccaaaccggcgccgtcgcagcctgctcctacctcctgccctcgaagatctctttaccacgctcaaccgccacatccaggcttccgcatacgacaatgcgtcaantcacggatcanattcacnt

SEQ ID NO: 2191 - DNA, 275 bp, Glycine max
  unsure (1)..(275): unsure at all n locations; Clone ID: 700556076H1
gctgggctggctactatgattgctgctatgcgacctgatattgataacattgntgantatcttaggaacactantgctagggccttagtgttgttgcttctgcacttggtattcctgcactgttgccattcttgaaggctgtggtcagagtaagaaatcatggcaagctaggcacacagggattaagatcgtgcagcagatcgccattttaattggttgtgcggtgttgccacatctgagatctcttgtggaaattatagagcatggtctgaatg

SEQ ID NO: 2192 - DNA, 281 bp, Glycine max
  unsure (1)..(281): unsure at all n locations; Clone ID: 700556077H1
tgaaaggcattagaaatcagtgaccggcgtgagagagcaaagatggtggttcttggcaccaccttcancttcaatttcctgcttgcccgtcttcaactcaaaccgactanaaggcgcgtcgatactgttcttttccgcaacgcccacgccacgcccacgcgcttcacgtttcttttgcggatcccctttcgctccaaatgccatccattctccttctctgtctgttacgaatgangcactgaatgttatgatttctggggctcctgcttctggtaaaggaa

SEQ ID NO: 2193 - DNA, 281 bp, Glycine max
  unsure (1)..(281): unsure at all n locations; Clone ID: 700556078H1
gnnagaataagggttaatttggcctaattgaaattcggagtgaaactcgggatctcgtccaggcttccatggaattgaattaataattcaattccatttctattaataaaagagtgaaagcagaaatttaaatggaatgtatagggtggggcaacaatatcataaaaaatacttagttaaaaaaacgaaaatactgtattgcaattgtattgcaattcgaaacgaaatatagttcgagatcattgtattatttttgtactatatnaatcttaatcttaatt

SEQ ID NO: 2194 - DNA, 284 bp, Glycine max
  unsure (1)..(284): unsure at all n locations; Clone ID: 700556080H1
ctagggagaagcaccagcattgcttgttgatgacntgcnggatggggctctgaatggncttgaantgaaaaatggaacttgcaaaacaactgctactgttggcgataagatggtgagtatatgcaatatgctacgaatatcacgataattctatgtatgttgttactcataattagattagtgcctagtcaaatcttctgcctaaagcaaaaactgggcctccattttgttgacagtatgtcattggtggngtgatgatggaacttttgtccattgaagttcaa

SEQ ID NO: 2195 - DNA, 262 bp, Glycine max
  Clone ID: 700556082H1
aagaaggggaaatgactgataagaacgggacaaagaaggaaacactttcgtctcgatttggttggtaaatcttcatctcaatacaaagatgcagatattctcgtcttcaacactggccactggtggaccatgataaaacttctaaagggcaggactattaccaagaaggtagccatgtgtatgctgaattaaacgttcttgaggcattcagaagagctttaacgacttggagcaagtgggttgatgccaacataaatccgtc

SEQ ID NO: 2196 - DNA, 249 bp, Glycine max
  unsure (1)..(249): unsure at all n locations; Clone ID: 700556083H1
aagaaagcgtatctgagaattttcgtttcgtnangtgtgtcangtgcgtgtggaggttcttttctttgagactttccttcaaattctagattgcttccctttcttttctttccctttaaccaccaacctctccctttcccccttttcatttcttcctcgattttccatttccataaccttagtcatcttcttctttcatctttctccctaactgtatcgagggaaaaatatggcggaagaacacagatg

SEQ ID NO: 2197 - DNA, 277 bp, Glycine max
  unsure (1)..(277): unsure at all n locations; Clone ID: 700556084H1
gngataatgaaacgatgagtcaaccgatatagtgatcaatgtgaatcaacagacaggctgtttgtggnctatatatanctntttcgtcccccttgtgaagatgtatanatgtgcttgctgctcggctaagcatggaagtttgtgatctgtctagtatttcattctagttaaagcatacttatccctgcatctgtatattgttttggtcagatttcagaaagctaggagtacaanatgatagcaatcagtcttcataggtagaggggcccacctgaat

SEQ ID NO: 2198 - DNA, 278 bp, Glycine max
  unsure (1)..(278): unsure at all n locations; Clone ID: 700556086H1
atgggccttctctctgttccaaaaccccaccttnncttaaanttaaacccccaaccatcgcgacgccgcnctggggctacgttcgggtgcggtgcggtggaccgcgttcccagcgtanccattgatgaaaggccgaatcctgagatcgaagcaatccaagccatccaaaccttaaaacgcctncaccgaaccaancctccgaanctctnctccctcgtctccaacaccctcangcgcctcatcaaatccgacctccttgctactctgcgggagctcct

SEQ ID NO: 2199 - DNA, 274 bp, Glycine max
  unsure (1)..(274): unsure at all n locations; Clone ID: 700556087H1
gcaaacttttctntttctctcttcttcatgctcgagtgcttggtctcgctcctttacaaaaaaagctatggaccacaanatctaatctaatctnnnnnnnnnnnnnnnnnctcctcttaattattcttttgattctcaaattctcttcggtttttttccctttctttttggtttcattgagtatgggttcngtggactgttatccttctcgtacggacgatgctgccgtggtgtctttggattcgctgcctttagggttccgattccgacccac

SEQ ID NO: 2200 - DNA, 258 bp, Glycine max
  unsure (1)..(258): unsure at all n locations; Clone ID: 700556088H1
cagaattggagaatctaagggaagttgcagaaagcaaggatgcantgttgcnanatagaaaggagcaaggtagaagaactgagccacaaaacagtaactcttgagacatccttacatgagaaagaatgcaattgaatttgcttgaaggtgtggaagacactggaaagggagctggcacaagctcagaaattgtggaggtaaaaccagcgatgaatgattggtcgccatctggtgcttttgtaacacctcaagttcgca

SEQ ID NO: 2201 - DNA, 276 bp, Glycine max
  Clone ID: 700556089H1
gtgaaaccccagtgacttgggaaaagggcagcaaccatggatgaggtcctccaggaggcagatataattagtcttcatcctgtcttgggtaaaaccacttatcatctagtcaacaaggaaagactagctaagatgaagaaggaacaattcttataaattgcagtagagggcctgttattgatgaagctgcacttgtggagcatttaaaacataacccaatgtttcgagtaggccttgatgtgtttgaggaagagccctacatgaaacctgggcttg

SEQ ID NO: 2202 - DNA, 276 bp, Glycine max
  unsure (1)..(276): unsure at all n locations; Clone ID: 700556091H1
gctcctcntagnaagctttctgtaatcncttttcantcaacganctncatacattgtgtcattcccggctgttgtgnactccaagacaacnaccactgttgttgttttnttcaacctcaacttgtttggcgncngcggcggcgtaaactcaaacaacattnggaatncnnnnnnnnnnnnnnnaccagcttcgtcgaaagngaaggnagtggaagtggnagtngangaggagctgccatggnttcaggaaaaggctttggacctggtcgagttcac

SEQ ID NO: 2203 - DNA, 280 bp, Glycine max
  unsure (1)..(280): unsure at all n locations; Clone ID: 700556092H1
tctctnnctctntaatagtnacagnaatantantatgcatnacatnaccaatngaagcacgtgcnngagcccaatacaacgtatttgcaagaatctctggctcatctncagccttcaaatttccaggaagggagtgatgttcttcttagagaggtgagtgcagagcaaaaggtggggcacctgnattcaaagttgcaattttgggggctgctggaggaatggtcaatccctntctttgctgnatgaagatgaacccattggtttcagttcttcatcttta

SEQ ID NO: 2204 - DNA, 280 bp, Glycine max
  unsure (1)..(280): unsure at all n locations; Clone ID: 700556094H1
gggcgggggaatatggatngggaactacanataatgttatttccgttcccatgtcaggngcacttnataccaatgagtgatatggcgagagcatttaatgnaagaggggtgaggacaaccatagtgaccantccactcaacgtagcactattcgtggaacaataggaaaagagacagagacagatatagaaatcctgacggtgaaattccctagtgcagaggctggtttacctgagggatgcgaaaatacagagtcaatcccctcccctgacttggtact

SEQ ID NO: 2205 - DNA, 281 bp, Glycine max
  unsure (1)..(281): unsure at all n locations; Clone ID: 700556095H1
gagagaaagagaaagagaatcgatcgacgctgctagagaagtagaagaagatggcnggtggtgctcccaaacaattgttcggattcggagttgtggcgttgcttgccactctcattcttcctctctttatgcccgccgctgttcaggtcaatccgcagcccctgcacctgcccctgctagcgacgggtcctcccttgatcaagggatagcttatgtgttgatgttgctggctctggtactcacatacatcatccactcggcctaaattcctccaccttctg

SEQ ID NO: 2206 - DNA, 288 bp, Glycine max
  unsure (1)..(288): unsure at all n locations; Clone ID: 700556096H1
aaagccatggccacctccaacttctgctattgttctctccgtctccnctaagccttctttttggtgctacttaccaaggcacactcgaccgataccgtttctttcaccttcaacaagttcaacccagtccaaccaaacattatgctccaaaagatgctagtatttcatcctctggggtgttacaactcaccaaagttggcagcaacggcgtgcccacctcgggatctctcggtcgtgccctttangctgccccaatccagatttgggacagcgaaaccggcaaggtag

SEQ ID NO: 2207 - DNA, 274 bp, Glycine max
  Clone ID: 700556101H1
atagtagaaggtcggggatagtaaagagagaaatccgaatagaaaaagaagctagctagggtttcggcgcgaagaagaatggggaagaagaaggtggagataaagcgaatcgagaacaaaagcactcggcagataacattctccaagaggcgcaatggattgatgaagaaagctcgcgagctatccattctctgcgatgcgaaggtggcgctgctcatcttctccagcaccggaaagctctacgagctctgcaacggtgacagtttggccgagg

SEQ ID NO: 2208 - DNA, 298 bp, Glycine max
  unsure (1)..(298): unsure at all n locations; Clone ID: 700556102H1
agcctccaaagtcagtgaatagtgagtgagtgagtagcagctagcaatggaaattactgccatggcttcttcagctactcctccacgaccttctcttccaactccttccacttctccacacacagtagtcacacnccacctttagcaaacctcaactcagacgctctcacatagcactaccaacttcaaccaccatttcattgctcgcnctctanncncctccaaacggaagccaaagccgctgtcagcatcgccaaggaccagattgtctcttctctcacccaagtggagaaaacgc

SEQ ID NO: 2209 - DNA, 290 bp, Glycine max
  Clone ID: 700556103H1
ggaaaattttggaatgccagacatcgtgtaatatgcaaggaaacgggtactcgttattcatttggtgcatttatgttatcaccaagggatggtaatgttgaggccccaaaaaaattggtggaagttgaccatgtacaacgctatcgaccatttaagtacgaagatttgagggatttcagaatcaccacaggaaagagggatggcgaatccttgatcaatatcgcatttgttagtcatttatgcatcgaaatacatcgccaatagaactttattttgaaaaataagttggc

SEQ ID NO: 2210 - DNA, 282 bp, Glycine max
  unsure (1)..(282): unsure at all n locations; Clone ID: 700556104H1
tttgaattgccaactctttgccattaatgttcaaacataacacaacaaacacaaagaangttcacaacaatgaccactctgtgatcattattnatttattcattagccgctcaacctttgaggcttgattgcttgaacggcatctttttgttcttgttctttcttcttcctctcttgcacttacatgggggctcgttgctctaaattctctttctgctggttccactctcacctcaaacnttctgtccttgaatcctctgaccaagaaaatggtgagaaggg

SEQ ID NO: 2211 - DNA, 291 bp, Glycine max
  unsure (1)..(291): unsure at all n locations; Clone ID: 700556105H1
ctctcttcgcagcctaaaatcccaatggcttcactctctgttttgcgccacaaccacctcttctcgggccccctcccggcccgccccaagcnnnnnnnnnnnnnnnnnnnnaggatccgaatgtccctccgcgagaacggcccctccatcgccgtcgtgggcgtcaccggcgccgtcggccaggagttcctctccgtcctctccgaccgcgacttcccctaccgctccattcatatgctggcttccaagcgctccgctggccgccgcatcaccttcgaggacagggactac

SEQ ID NO: 2212 - DNA, 293 bp, Glycine max
  unsure (1)..(293): unsure at all n locations; Clone ID: 700556107H1
cttcaattngctacttcaattctggattgcaaccacgacactactnccaccttccaacatgggcggtatcngccttgaggaaatcaaaaacgaaaacgtcgatctggaaaaaattccagtagaggaagtgttngagtcgctgaaatgttcaagagcaggtttaacatcagacgaaggagccagccggcttcaagtttttggaccaaacanattggaagagaaanaggagagcaaacttttgaagtttctgggtttcatgtggaaccccttatcatgggtcatggaagctgctg

SEQ ID NO: 2213 - DNA, 288 bp, Glycine max
  Clone ID: 700556108H1
ctgagaatgggatggtgagtagtgagggtgaaaccagtttcacttgtgtcatgaagtttggtggctcctctgtggcttctgctgataggatgaaagaggtggctacccttatattgagttttcccgaggagaggcctattgttgttctctctgctatgggaaaaacaacaaacaagcttttgctggctggagagaaagctgtgagttgtggtgttatcaatgtatcaagtattgaggagctttgctttataaaagacctgcatctaaggactgtggatcagcttggtg

SEQ ID NO: 2214 - DNA, 292 bp, Glycine max
  Clone ID: 700556109H1
aaacaagcccttatcacaactctatctaacaaattacataggacagggcccaaaaccaaaaaaagcttctttgtctctcgtgccgattctccaccactattcccttcaccccaatcacactttccggtagttgttgctattagtgtagaagatgagtacgctggatgcaacaagggctgaacttggtcttcttgttttatatttgggcaaggctgaagcaagggacaaaatatgcagggcaatacaatatggttccaaatttttgagtaatggggaacctggtactgctcag

SEQ ID NO: 2215 - DNA, 223 bp, Glycine max
  Clone ID: 700556110H1
cccctccctctaagaaatgcggtcaattcctctgggaacctcagtatctccaactcctataaacacctcaaagttatcacctttcagtgttaattttaagaaaccaaccactttcccatcttggggttcaactcctcctcatgaattctctctctcccaatcaggattatgtagagcaagtcaagttgttgatttgttcccgactgtgtctcctgaaattatt

SEQ ID NO: 2216 - DNA, 287 bp, Glycine max
  Clone ID: 700556111H1
cagagaccgaggaacagatccttaagcgactacgtaatgctgaggctgagattgagcaagggaaatcttctcaagtatttgatttcatcctatacaatgaaaaacttgaggagtgttatgagagacttaagaaactattgggacttgacggtttcatcactgctccacctaaatccggacctatagagattgatttaccaatggaccattcagtgtccaaaattgataacaaaatcatcataaactgcatctcctcaggagaaaaggaatccaagaatttgatcatt

SEQ ID NO: 2217 - DNA, 286 bp, Glycine max
  Clone ID: 700556112H1
cacctaatcaactcagtgtaatgcaaggattcaggacagatttcttaagggcatttagtgtggttggcaacgccgcatctaaagggcattttatagatggttgctatgcacactgccaaactggaatacaagagacatggctgagaaatgactccccagtggtggccaagacatcaattgcaaaggcagtgggtgattggttttatgatcgaaggcccttccgtgagatagattgtgcctacccttgcaaccctacttgccataatcgtatttttgatcagaatga

SEQ ID NO: 2218 - DNA, 285 bp, Glycine max
  unsure (1)..(285): unsure at all n locations; Clone ID: 700556114H1
gtgagaagagaatggagagtaaagaggaagatgttaacgttggagcaaacaagttctcagaaaggcaaccaattggtacagcagctcagggtggtggtgacaaggactacaaggaggcacccccagctcctttgtttgaacctggtgagctcaaatcatggtccttctacagagctggaattgctgagtttgtggcaactttcttgttcctctacattaccatcttaactgtcatgggtgtnaacaggtcaccctccaagtgtgcctctgttggcattcaaggca

SEQ ID NO: 2219 - DNA, 287 bp, Glycine max
  Clone ID: 700556115H1
attttggcagcctgggcccaagggagaatctcctacggtgctttataaagcgcaaccggtccacccaaacatactatttgtttctcagtttaaccagtacgctagctgaagatgggaagttccttcttgctgcacgcaaatgcagacgtccaacctgcacagattatatcatctctcttgacgcagatgatatgtcaaagggaagcaactcctatgttgggaaactaaggtgtgatgctaattaggcactgtggctattattgttgtcttgtttgttagtgcaaaga

SEQ ID NO: 2220 - DNA, 287 bp, Glycine max
  Clone ID: 700556116H1
atagccatgaaaaccacactctcactctctcctttacttctcttcctactcttctccctagtccaaggactcacccccaaatgtgacacccaagaccatggctcaacccttgaagttttccatgtgttcagcccatgttccccatttaggccatcaaagccactctcatgggcagagagtgtcctccagctgcaggccaaggaccaagccaggctacagttcctggctagcaggtggctgggaggtcaattgtgcccattgcctcaggaaggcaaattattcaaagc

SEQ ID NO: 2221 - DNA, 271 bp, Glycine max
  unsure (1)..(271): unsure at all n locations; Clone ID: 700556117H1
gtgntnatggcagcgtcacnncaagcagcagctactntccatgcaacccaccaagttgagcangngcaacactttgcagcaaaagnctactcagtccatttccaaggctntnggtntngaacctgttggagcnnaaaaggtcacatgctcccttcaggctgatcttaaggacttggctcanaagtgtgtngatgctaccaaaattgcaggatgcgcccttgccacctctgccctcgatgtcnctggggcaagtgctgaaggtgttccaagg

SEQ ID NO: 2222 - DNA, 289 bp, Glycine max
  unsure (1)..(289): unsure at all n locations; Clone ID: 700556118H1
ttgccccctcctttttgctatttntgctttaatgttnatcctttttaattatttntacttnactgtgttttctggggtcaaccctttgcttgtntttaaaatttgttggctggtggcttttcatntgntacttctttgggttggttcgcattctagtggagaaaatatctcatgtggtgtgatnttnactgcaggatgtctctcaagatctgtctggggagtgaagcntaattngattagtgatatnaaggagtaagatctcattcaacacactaaacnatancngatt

SEQ ID NO: 2223 - DNA, 289 bp, Glycine max
  Clone ID: 700556119H1
cccattcattgtgtgtacaatatgtgagaagaagaatgagaaggttttgacagaatgctacaccacattacatgtctctgagtgcaatttctcatgtcagaactcacctattatcaaagtgaaagagtgaagcttttctcaagaagaaactcatgttcccagaatggcttcccctccttccccacccccatgtcgctttgctgctctctctccattttcttgtacaaatttctcaatatttatttgtttttctatgttatttctgagaggaaaaaaaaagcatactggt

SEQ ID NO: 2224 - DNA, 229 bp, Glycine max
  Clone ID: 700556120H1
catgtccatctgataaccctttcctgattctctttcgtggttgttgctattctgagtgatgggtatgccctgccgctgttcccacacctcccacatcactgaaatcatcatcaccagcttcttccgccacaagtcttagatcaacaatttccgtcaattattccaaaaccacctaagagccttttccaaatggccccttaaagatcgaacttggtcggagtaaacatgg

SEQ ID NO: 2225 - DNA, 286 bp, Glycine max
  Clone ID: 700556121H1
cgtttcgttacgttctgcttcgcgtggaccaacaagaagtgtaagttttcattcaatggccagcgctcagctctcagcaatatcttcgtcgatctctacggcgtcgtttgaagggcttcgaccttcggctgttcagtttgcttccgcgggcagaattagaattggcaatctctcccaaaggtctttccggggcttggttgtcaaagccgccaccgttgttgcccccaaatacaccgcgattaagcctctgggagacagagtgctgataaaaataaggaagcagagg

SEQ ID NO: 2226 - DNA, 288 bp, Glycine max
  unsure (1)..(288): unsure at all n locations; Clone ID: 700556122H1
cgaggagataaggatgcagcaatagtcttcaatcggggaatatatatttgacaaggaataacanngatggatgaagacctgtgttaaataacgatttgncctagctnacgaagcctcctctgcntgctatctntnagtnagggctncacgattcatacgttgttcncggctaggtcgtggcctcggtncatgctaannnncaccgtcattaactatcatcagatatttattcatgttactgtgaaaaagggattaaaggnaagtattaaactctttagagagatttgt

SEQ ID NO: 2227 - DNA, 288 bp, Glycine max
  Clone ID: 700556123H1
gagctcgaagtgatccactccaggtgggccatgctcggggccttgggctgcgtcttccccgaactgttgtcccgcaacggggtcaagtttggagaagctgtgtggttcaaggccgggtcccagatcttcagcgagggtgggctggactacttgggcaacccaagccttgtccacgcccagagcatcctcgccatctgggccacccaagttatcctaatgggtgctgttgagggttatcgtattgctggtgggcccctcggtgaggtcactgacccaatctaccctggt

SEQ ID NO: 2228 - DNA, 286 bp, Glycine max
  Clone ID: 700556125H1
atgaccgaaatgaatggcgtttattgttctagtaggcccatgcgaataggtgttgcaactcccaagaaaacttatggcttccaacaacaatattcttctcaagctgtggtattggctgggggacactcagctaatggtgctgtggcccaaggttcccattctgaaggggatataaacaacactactatatttgttggagggcttgattctgataccagtgatgaggatctcagacaaccatttttgcaatttggtgaggttgtctctgtgaaaattccagttggta

SEQ ID NO: 2229 - DNA, 286 bp, Glycine max
  Clone ID: 700556126H1
gaagttggaagtcatggcagcaacattgatggcagcaacaacaagttctggtactcttaaagcaactcctttccttggccaaggcaagggtgccaatgccaatgctcttagggatgttgtctccatgggaactgggaagtacaccatgggcaatgatttgtggtatggaccagacagagtgaaatacttgggacccttctcagctcagaccccttcatacttgaaaggagaattccctggggattatggatgggacactgctggcttatctgctgacccagaagca

SEQ ID NO: 2230 - DNA, 285 bp, Glycine max
  Clone ID: 700556127H1
gagaagccctccgccattcagcagcgggccgtcacgcccatcattcagggccgtgacgtcatcgctcaggcccaatccggaacggggaaaacgtccatgattgctctcaccgtttgccaggtcgtcgatacctccgtcagagaggttcaggcattgatattgtcaccaacgagggaactggcctcacagactgagaaagttatattggctattggggatttcattaatatacaagctcatgcatgcgttggtggtaaaagtgtgggagaagatataaggaaactt

SEQ ID NO: 2231 - DNA, 286 bp, Glycine max
  Clone ID: 700556128H1
cctcaaatagcaacacccttctctactcttcacttttcgctctctttctctacatagtttctttttcactctcccattcttcttttttaagcaacaacaacctcattcctcggatcctaagaaaatgggaaccagagtgtggtgttgtttcatgatgttcttcctctctctcaatgctcttgcaatagcattggaagatcacaacctcaaaacgacgtccagggatgacatcaagtgcaccccatgtggccaagttccctccccgccgccaccctctccgccgccg

SEQ ID NO: 2232 - DNA, 282 bp, Glycine max
  Clone ID: 700556129H1
aatcagtggatcttcaagacctcttgcttcggctcacttttgacaacatatgcggcttggctttcggccaagacccgcaaaccctagccgtggggctcccagataacgctttcgctctctccttcgatcgagccaccgaggccactctacaacgctttattttacccgagatcttgtggaagctgaagcgatggctcaggctcggaatggaagtgagcctgagccggagcctgaaacacatcgacaattacctctcccacatcatcaagaaccgcaagctgg

SEQ ID NO: 2233 - DNA, 285 bp, Glycine max
  Clone ID: 700556130H1
caccaatggcatccctcactgtcccaaaccattgtgttcccaccttgcttcgcactcactctcccaaccacccatcttcccaaaacctcccatttccttccacaccatcaaattctcaatttttcggcctcaagttatctcattcttctgtttcatctatcccttcatcttcttcactcaaaggcaccattttcgccaaggtgaataaaggttcaaagccaccgaattttacgctgaaagatcagaatgggaagaatgtgagcctctccaacttcaaaggaaaac

SEQ ID NO: 2234 - DNA, 283 bp, Glycine max
  Clone ID: 700556131H1
tttctcctctctccgattccttttattaattggagttttctcgctcctttttctttccctgaaaacatttcatcttcgtattgatgtcggaaaagggtcggccacttcccaaatttggtgaatgggatgtcaatgatccagcctcagctgaggggttcacagtgatttttaataaggccagggatgagaaaaagacaggtggcaacccagagtcaccaggaaagactgctactgatcctcatagcaaacctgcagtagagcctggcaaaactcagactaaaaa

SEQ ID NO: 2235 - DNA, 289 bp, Glycine max
  Clone ID: 700556132H1
caaaaaaacaagctaagttgcaagaaattatggaaatgctttgttttcctcctattagctcttttgttatactctcatcacctgatatatttttcatatatagaaaatgttaacatgtaatgaatgtgtgatacttaaattcatatccttaaaatttagaaagaaaacaaaaagacaaataagttttaagcaagggacaactatattgacaagctttatattactatactatgtatttttctagtgtgtaaattccttgattagaattagttcatattcatagaatttg

SEQ ID NO: 2236 - DNA, 293 bp, Glycine max
  unsure (1)..(293): unsure at all n locations; Clone ID: 700556133H1
gaaaactcaattccgcacaaattcgagacattgctgctgtcgtggttcgcgttgagcatgggtaagattcggagagaatccgcgaggccgttctcgaattgttcgtcgtcggcgtctccgtcatcggcgccgccggcaacgacgtcgtcgatgtcgttgacggacacggtgagggggtcgcaccggttcaagatcacggggtattcgctgtcgaaggggattgggattgggaagtacatagcgtcggatatattctcggtgggagggtacgattgggcgatctattgtnaccc

SEQ ID NO: 2237 - DNA, 289 bp, Glycine max
  unsure (1)..(289): unsure at all n locations; Clone ID: 700556134H1
gccgggatcaaatccgataactaccgtctcctcgccacggttgcggttgggttcgtcaagaccgtttccattttggtcgccacttttttcttggaccgggccgggcggcgcgtgttgctgctttgcagnttagtgggctcatactctcgcttttgactctgggcctgagtctcactgtggtggaccattcgcagaccacgctgaattgggccgttgggctcagcatcgctgcggtgctgtcctacgtggcaactttctctatcgggtctgggcccatcacgtgggttta

SEQ ID NO: 2238 - DNA, 289 bp, Glycine max
  Clone ID: 700556135H1
ataagattaaagattcaacaatggcctctgcttctgctactcttctcaagtcatctcctgttcttgacaagtgcgagtgggtcaaaggccagacccttcgccaacctctcgtgagatgtaacccttcctcagcatcagctctcaccatcaaagctgcttcctatgctgacgagctcgtcaaaaccgcgaaaacagtggcctcaccggggcgtggtattttggcgatggatgagtcaaatgcaacctgcgggaagcgtttggcatctattgggttagagaacacagaagc

SEQ ID NO: 2239 - DNA, 290 bp, Glycine max
  unsure (1)..(290): unsure at all n locations; Clone ID: 700556136H1
ctggttcaactgaggtgatggctttgaatttgccttctcccgcncaagtgaagcccttatttttctcttcaaataactccacaaaacttccaggtagcttttctttgaagagaaaagatagtgacacaacagtagagagacgagtttattgctctgccgctgctcaatcaccaccaccagcatggccaggaacagctattcccgagccttctgatttcaagacatgggatgggcaaaaacctatttctgtcttaggatctacgggttcaattggaactcagacactgagt

SEQ ID NO: 2240 - DNA, 285 bp, Glycine max
  Clone ID: 700556137H1
gttacagaagaccagatcgaggaaatctactctaccggacaatcaaaggcttaaaccctggtcgaagcgaaggcatgcgatgagggaagagagagaccaccaatgcaagtggatcgacttaagcatcgatttcgaaggcgacaacatgaagcatgaaaatagagccagccactttttatcgttaataatgttacaagcaacaagataaaatacgctcttggatgcatgcccctatctcccacccatcgtcctgatcttggcttgaagtatccaagtagcgctaaa

SEQ ID NO: 2241 - DNA, 285 bp, Glycine max
  Clone ID: 700556138H1
ttccggggtggtcactttctgatgtggacaagatgggggttcaggcaatgaggcatcaggttcaggcaccgaggcggaggcatcagcttctgcactagcctttttgtcatcgttttcattcgtgatggcattcagatcaatgttccggagggaatccgtgcttacaacaggaacaacgggagctgcaatattctcctcctttggtatctcctttgactcagaaccattatccattgctatacttgtgtttgtattttgcagcgacacgtatcttcatcaataatc

SEQ ID NO: 2242 - DNA, 289 bp, Glycine max
  unsure (1)..(289): unsure at all n locations; Clone ID: 700556139H1
ccanaatcagaacctgccccccccaaacctgaaccccaaccacccatctccaaaccagagcctcaggaattcgttgcagcaactgtcaaaaagantgaagatgatggcgtcgaaacagtgccaccaactcatacgaaacccgaactcgacgccactgtcaaaatggaggaggccgaagacgaaccagaatcagttcgagacgatcccatagacgaagatatccctgaagaagacacagttgtgcgcgaaattgatgtcttcttctctccttctgtcgatgcccagactc

SEQ ID NO: 2243 - DNA, 286 bp, Glycine max
  unsure (1)..(286): unsure at all n locations; Clone ID: 700556140H1
caacttctgctacttcctactccaaccgcacttctgctccgcaattatcatgggcaaggtcaagatcggaatcaacggatttggaagaattggccgtttggtagccagagtggctctgcagagagacgatgttgaactcgttgccgttaacgaccctttcatcaccaccgattacatgacanacatgtttaaatacgacagtgttcatggacactggaagcatcacgatgtcaccgttaaggacgagaagacccttctcttcggngacaagccagtcactattttt

SEQ ID NO: 2244 - DNA, 288 bp, Glycine max
  Clone ID: 700556141H1
tagccttgttgcagccatggccacccacgcggctctagcttctacaaggatccccactaacaccaagttcccatccaaggcttcacactctttcccaacccaatgcgcctcaaagagacttgaggtgacagaattctctgggctaagatccacttcatgtgtgacatatgctaacgatgctagagaatcttccttttttgatcttgtagcttcccaactcactcccaagaccaatggatcatcaactcctgtgaggggagagacagtggccaagttgaaggtggcaat

SEQ ID NO: 2245 - DNA, 289 bp, Glycine max
  unsure (1)..(289): unsure at all n locations; Clone ID: 700556142H1
ctcactacgctgcgccctacgtcgncgcnccctccgtgcaaatccccgctcctccagtcntccggccccgttgcgcccgnccctgtacccggcgtatactccgccgtgccgcaatatcaggcacagcagttatttgagagggatgcgcagataataacgccggaggctctccgagaatgtcaaggcagcgattgcaagcagcgacgtggagcacaaaaccgatgccaaanaganagcggttcctcgcaaagctnctggccacgcttgggaggatcctatccttgcagag

SEQ ID NO: 2246 - DNA, 284 bp, Glycine max
  Clone ID: 700556143H1
tgcagttcttcttggctttggcattgttgaccaatgcactaagcgtgatgaaattataaatttactaatgtctgagactgccgaagcagggatagatggagcaaatttatctttgttatcagacttgatgaaattgcagttgtcaggcattgatgaaactcagcaaccattgtcatctcttatctacccaactagcaaattcaacatcctgaagcctttgctgtattttgttcaaggttcagccctttcatcaaagatcacggttcatccagatggtcaaatga

SEQ ID NO: 2247 - DNA, 281 bp, Glycine max
  unsure (1)..(281): unsure at all n locations; Clone ID: 700556144H1
gaggggagaaggagtaccattgtcagcggtgcaaacagaaagttaaggctctcaaacagctaacaatacataangcaccttatgtgctaacgatccacttaaagcggtttcatgcccatgatactggacaaaagattaaaaagaaggttcaatttggctgtgcactggacttgaaaccttttgtcagtggctcaaatgatggagatgtgaagtactctctatatggtgttctggttcatgctggttccagcactcatctggacactattactgctatgttc

SEQ ID NO: 2248 - DNA, 282 bp, Glycine max
  Clone ID: 700556145H1
atccactggagacaatttctacgatgatggattgactggtatagatgaccctgcatttgaaatttccttctcaaaaatctacactgccaagagcctccaaaagcaatggtatagtgtgttgggcaaccatgactacaggggtgatgttgaagctcaattgaatccaatccttcagaaaattgatcctagatggatctgccaaagatcatttattgttgatactgaaattgctgagttcttcttcattgattcaacaccttttgtggacaagtattttcttaa

SEQ ID NO: 2249 - DNA, 284 bp, Glycine max
  unsure (1)..(284): unsure at all n locations; Clone ID: 700556146H1
agttctcatcggaaaatggacgttcaccgaagacccattccttcttccggcgaacaccgacaaacccagaagctgaagnnnnnnnnnnnnnnnnnnnnngattcgaaatcgcaatcgcaggcgcttctgcctctctacctcaccaacgccctcttcttcggggtgttcttctccgtcgcgtacttcctcctccaccgctggcgcgagaagatccgcaccgccactcccctccacgccgtcagccccgccgagaccgccgccatagtctccctcgtcgcctccgc

SEQ ID NO: 2250 - DNA, 287 bp, Glycine max
  Clone ID: 700556148H1
gcaacaacaactatctctcatccttcttctttctgtatccgtaacacttgcaacacacatggctacaatcaccaacactttcatattcaaaccccccatctctcatcacccaaagcagcttctttattcccaccgctcttctctacgctttctcaccaaatttaaaaccccctccggagcgaattctcggcggctggttccgaaagccacggcggctcccggggccaagaagacagaaaagccgcacgagagagtccagcgagtccacagcgtggaggagttcgagt

SEQ ID NO: 2251 - DNA, 292 bp, Glycine max
  Clone ID: 700556149H1
ttgaatttgccttctcccgcccaagtgaagcccttatttttctcttcaaataactccacaaaacttccaggtagcttttctttgaagagaaaagatagtgacacaacagtagagagacgagtttattgctctgccgctgctcaatcaccaccaccagcatggccaggaacagctattcccgagccttctgatttcaagacatgggatgggcaaaaacctatttctgtcttaggatctacgggttcaattggaactcagacactgagtatagtggctgagttcccagaaagat

SEQ ID NO: 2252 - DNA, 290 bp, Glycine max
  Clone ID: 700556150H1
tatcagttccaggcatcatttaacagacttttcaattagccatgtcactaaagtcagttactgtattgactacatatctcatctatgcatccatagttgctaagtcagctatggatccctacaaggccctcaacatcatcctgaacccaaacggaaccctcacacgcttaagcattcctccacaaagccctccctcaccggatcccactctccccacagcggttctctccaaatatctcaccatcaaccaatccaagcacacctgggcccggatctacctaccccacaaa

SEQ ID NO: 2253 - DNA, 288 bp, Glycine max
  Clone ID: 700556151H1
tgaggtcgtagaaagaatggcgaaaacgacgtcgttgttgctctttacactgctcctcttcggaaccttagctctcatccaggcgaagaaatcgaaggaggatttgaaggaagtgacccacaaggtttactttgatgttgagattaatggaaaagaagcaggtcgtattgtgatgggtctttttggaaaggctgttccaaaaactgcagaaaactttcgagctctttgcactggggaaaagggaactggtaaaagtggcaagcctctccattacaaaggtagctcatt

SEQ ID NO: 2254 - DNA, 287 bp, Glycine max
  Clone ID: 700556152H1
aagagactacacagcttgaaaaggatgtagaaaagcaaggtgattttgtcaactatgcctgggataacataggaagctttgatgatcttgatcgaattttcagtgatgattttgcagcaatgatgacgaccctatatttggccatgtaagtcttgagaattctgatgagctgtggtcttccaaagacgtgagtaacagcacagtacccatactcttggagacaccaaacccaacaagtgctttaaggaacagatctgagcctttggaaattaaagcagaatatgtcc

SEQ ID NO: 2255 - DNA, 284 bp, Glycine max
  unsure (1)..(284): unsure at all n locations; Clone ID: 700556153H1
gtggtcagcacaccaagactactggccgtaggggaaagactgttggtgtctctaagaagcgttaagctattatgtttggcttggagattagattttgttgagaaggaaagtttgaagtacactagacatgttttgcatcataccaactttgtatccgtcgttatatggcttgacaatttcaattttgtttgtnatttgcatcaagattcagtttagttaaatgatgtgttggttttcttagttgtagagaaccctgaatagtattattgaaatattacgaattc

SEQ ID NO: 2256 - DNA, 285 bp, Glycine max
  Clone ID: 700556154H1
gcagggatggcctccactctctctatatcctcttcatccacccttgttgatgccaagcctccaactccaagacaatgcgtcacccttcccactcttccccctccaccttttcactctcagactcgtccttggaagaccactgctttctgtcgtaggcttgctcgcaattttatggcaatggccaccacaagagaggcagccgcagcagaagttgccgccacaactgacctctctattgccgagacgccagagattgtgaagactattcaagaagcttgggacaaa

SEQ ID NO: 2257 - DNA, 286 bp, Glycine max
  Clone ID: 700556155H1
ctccaactccactagtgaagtacagaaaagaagaattggaaaatctaagaggagatggaaaaggagagcgcaaggaatatgataggatctatgattatgatgtctataatgatttgggtaacccagacaagagcaatgatctagctcgtcctgttcttggagggtctagtgcctatccatatcctcgcaggggaagaactggtagaaaaccaacaacaaaagactctaagagtgagtcaccatccagcagcacctacatcccaagagatgagaactttggtcactt

SEQ ID NO: 2258 - DNA, 286 bp, Glycine max
  unsure (1)..(286): unsure at all n locations; Clone ID: 700556156H1
gtgaaccaagttgctgacaaatattgggatctgtattctaacgagtcacttgagcatgaccttcccggtcaccttctccgctaccccatcggggttgccagtgaaggagatgtcaccgagctgccaggatttgaattctttcccgacaccaaggctcgcattcttggtggcaaagnttcgntacctcccccctattctcactacttaatttgattttgtactttgttacaaacttgttattgcttacatcctaatctgtgttttcattactacttagtaataatct

SEQ ID NO: 2259 - DNA, 284 bp, Glycine max
  Clone ID: 700556157H1
ataagctagtttatcgtgaggagaatatgaagttgtttgttttctttgttgctgcagtagttttggtagcatggccatgccatggcgcaggctaccaaaggttccctctccgaatgaaaactggctatggtgagcgttcttcggaggtaaaatgcgcaagttttaggcttgctgtggaagcacacaacatccgagcctttaaaaccattcctgaagagtgcgttgaaccaacaaaggactacattaatggcgaacaatttagatcagactctaaaacagttaac

SEQ ID NO: 2260 - DNA, 284 bp, Glycine max
  unsure (1)..(284): unsure at all n locations; Clone ID: 700556158H1
actaactccacctaacttcttttctctctggggttctttctccatttccattggctttcaaaagtcaccaacacaattctcccttcagagtttcaatggctgtttcaacaagtttccctggtgcaaagttggaggctttgttgctgaaatgtggctcctccaatgctgnnnnnnnnnnnnnnnnnnnnnnnnnncatttgtcatgtttttgcaaaaccagaaagacacttgttcagagtcagagagggcctattcgctgtgaggcttcttctgcttctgatgtt

SEQ ID NO: 2261 - DNA, 281 bp, Glycine max
  Clone ID: 700556159H1
cacatccaaagcttcagttcaatatggcaaccttgtcaagttttgctcctttggccattctaagtttagttctagtaattagtgccattgtctttgaggctgaagctaggccaaggacattctttgtatttggagattcacttgttgataatggaaacaacaattacttggctaccacggcacgtgccgatgctcccccttatgggattgattaccctccaagtcatagaccaactggtcgtttctccaatggctacaacattcctgatcttatcagtcaa

SEQ ID NO: 2262 - DNA, 281 bp, Glycine max
  unsure (1)..(281): unsure at all n locations; Clone ID: 700556160H1
gttacttgcacgttggagaggagttgcagttggaccataaganatccccgtttctcaaccctgacggggatgcttcctgcgcccataacttggaggctcacttgcacttgctagatggataccatgggaagaatcgtggatttgagcgaacaagtgagagggaccttgcnctggtgaacaaggactgtgacttcttgaaagatgagcattcggtgccaccacggtggaggcaagacttgaacaaaaacatggtcaggactgaagatggacgctgggtgctc

SEQ ID NO: 2263 - DNA, 277 bp, Glycine max
  unsure (1)..(277): unsure at all n locations; Clone ID: 700556161H1
caatttttctctgccatttttcatttcccctttttttnttngttttggttctnttctnaaaagggtttgtttcncttttcagaattncgtcggnttatttggggaagtttctatcttggtcttgtnctgttctgtagtgtgtttncagttttnaagttttgagcttcactaacttcagcatactcctttgagtaaatgagtaacatgaagttgganttgcatgttggaatttngncacctgaatggtgattctctctgggacttncngtgttggaga

SEQ ID NO: 2264 - DNA, 280 bp, Glycine max
  Clone ID: 700556162H1
gttaggtcagctggccttttgatctgcactgcaggggcctcaacaccaacacttttactgcttgatttaactcctaaaaagtcacaaaaggctggttcttcagttgatgaatttttgcggtccttgtgtctcgaaaagtatctcataacttttcaggctgaagaagttgatatgacagctctcaatcatatgactgatgaagatctcaaggctatgggtataccaatgggaccaagaaagaagatacttttagcatggagtcgaaagtctgaccatttag

SEQ ID NO: 2265 - DNA, 177 bp, Glycine max
  Clone ID: 700556163H1
gcttcctctaagatatatagactgtggcaacaaaacgtcctttgcattcatgggatgcatctcttcagtcaaataattatgttcacttttcagcttgcttttttggatgacattataatgtttatgtactagcttgtgatcgctgatcattatggtatagttatcctaccagtacta

SEQ ID NO: 2266 - DNA, 295 bp, Glycine max
  unsure (1)..(295): unsure at all n locations; Clone ID: 700556164H1
gccaaatccatcncttcattccttaatttaaaacctccactcatttccataaattctctgtntantctcctcgattttaccgcaacatgacacaanaaggaaatggcaacaccaacttctgtatgagtgttaacaacaacgggctacattagcgctaatgacccgttgaactggggcgcggcggcggaggcgatggccgggagccacctcgacgaggtcaagcgcatggtggaggagtaccggangccggtcgtgaagctcggcggcgagaccctgacgatctcgcaggtggcgg

SEQ ID NO: 2267 - DNA, 291 bp, Glycine max
  Clone ID: 700556165H1
gaaggatcctgagaaatatgaatttcgtcctaagcatttgctaaaacagattgtgcacatatatgttcatctagctaggggtgacacgaattccatcttcccagctgccatctcaaaggatggccggtcatacaatgatcagttgtttagtgctggggcagatgtccttcacagaattggggaggatgggagaattatacaggaatttattcaacttggtgctaaagctaaagttgctgcttcagaggcaatggatgctgaagctactctaggggagataccagatgaatt

SEQ ID NO: 2268 - DNA, 287 bp, Glycine max
  Clone ID: 700556166H1
gtaacccaataatggcattgagactgagactcaaagtgtcttcaattgggtcaccttttctgcagttaggttcttctgcaactgctgccttctcattctcccaaccatgctctcttcccaaacttgcttttcatccaccacgcttgcaactcaacaaaaattcacacccaataaggttccttgttcgggctggtagaactgagtccaaaggtgttaccttgggcttcagggccccacaatttcagcttccagagcctcttatgggaaggtttggacattggaagatt

SEQ ID NO: 2269 - DNA, 285 bp, Glycine max
  unsure (1)..(285): unsure at all n locations; Clone ID: 700556167H1
gagacagtggccaagttgaaggtggcaatcaatggtttcggacgcattggtagaaacttccttcgctgctggcacggccgaaaagactcaccccttgangtcgttgttgtcaacgacagtggtggtgtcaagaatgcttcgcacctgcttaaatatgattccatgctgggaacttttaaagcagatgtgaaaatactggacaatgaaaccatcactgttgatggtaagcccatcaaggttgtttcaagcagggaccctcttaagcttccttgggctgaacttgga

SEQ ID NO: 2270 - DNA, 286 bp, Glycine max
  Clone ID: 700556168H1
gttttctcttcctcgttcgtttcatttcgtttcgttgaagagcaacttttctctctctgtctctgtacaattctcccttttcttccctcgtagatcgaaagggaatattcttccatggcctccaagcggattctgaaggagctcaaggacctacagaaagaccctccaacctcttgcagtgccggtcccgtagcagaagatatgtttcattggcaagcaactataatgggtccccctgatagcccttatgctgggggtgtttttctagttactattcattttcctc

SEQ ID NO: 2271 - DNA, 284 bp, Glycine max
  Clone ID: 700556169H1
gtcagttcaatgtggatgcaacttttataagctacaaagtaaagtgtattcaaataaccgttgattaaaatgaaatgaatagttttgttttctataaactgtaagttattgcatgtattcaatcttgtaatctcaaaatattttgttttgtttcacgtggttgtatatcaatagattctttatcaattgtaggtgaaaaattgtcataggttttgttggataaataaatattgatgtttaataggttctgtggattgtatatcccggcattctttgttctatgt

SEQ ID NO: 2272 - DNA, 282 bp, Glycine max
  unsure (1)..(282): unsure at all n locations; Clone ID: 700556170H1
gaagattccacaacagtgggagggagatccaaaaagagagagtggaaaagatggcgcggttgatcacagtggtgtggtgcgcggtggcggtgctattatgcgccgcggccggtgcgtcgtgggtggaggaggcggcgaacccgatacgaatggtgtctggcgtggaggcggaggtggttcgggtgatcggggagtgccggcgtgcgttgaagtttgctaggttcgtgagcaggttcnggaagagttaccaaagcgaggaagagatgaaggagaggtacgaga

SEQ ID NO: 2273 - DNA, 283 bp, Glycine max
  Clone ID: 700556171H1
gaaggtgaaagatattgaacttcaagtgacagaaagattcagggacagagtggtggaggaaggttataaccctagttatggagctagacctctaagaagagccataatgcgacttttggaggacagcatggctgagaagatgcttgccagagagatcaaggagggcgactctgttatagtggatgttgattctgatggtaatgtgattgtgctcaatggtagcagcggacccccgaatccttgccagagacgcttcctgtataatgcggttaatttgctaata

SEQ ID NO: 2274 - DNA, 268 bp, Glycine max
  unsure (1)..(268): unsure at all n locations; Clone ID: 700556172H1
acttgtacactctnccaaccacnccaacaaagtggttggntntnggntctnaagccatggcatccacatccnctcngcnnntancncaggccctnctggcacgtgcngtgtaccttcatggctctactnctgaccgtgtntcactctccttcncatcattancgggcctcaagtcacattcnccatgcaaagcagcagcnacgtcctcacgtagaaggggtgcttgcgcntccaccagcgtngtncggcagctgcggttgagacactg

SEQ ID NO: 2275 - DNA, 283 bp, Glycine max
  unsure (1)..(283): unsure at all n locations; Clone ID: 700556174H1
tggaganggaggggtatcatccgaaccccgtcccgttctcactgtctcattcaaaggtcttttttcttcccttcttccttcctacttttattcaatttccaacctttntctctctttcttttcccaattgaatgacaacaactccaactacatagtaatattattattccaagtttgatgatttgatgctcctcgtgtttttcttttccatcttttaagcgttttcgaccctctccgaccatgggaacctgcttttccgccaccaaagtcagcggctcccacg

SEQ ID NO: 2276 - DNA, 228 bp, Glycine max
  Clone ID: 700556175H1
tagtgtatgccactctggttaattatcatacccccttctaggcatagttcttctccctctgttctctattctacactgtgaaaccaagatgaaggtagcatttgtagctgttctacttatttgccttgtcctaagctcctccttgttcgaggtgtcaatggccggttctgctttctgctcctccaagtgcgcgaagaggtgttctagggctgggatgaaggacaggtg

SEQ ID NO: 2277 - DNA, 280 bp, Glycine max
  Clone ID: 700556176H1
gggagaagagggatattacaagatctgcagaggtcgcaatgtatgtggggtggactcgatggtctcaactgtcgctgctatacatgtttctaacaattaaatataaggatggatgcctaaacgtggtaggggcaccagtatagtatgtatgtaaataatttgcacgatgtaatgttatgaaggaggaaactgctaagcacatgtttatgcttttattctgtaattctctatgctagctagctctccccccatgaattctttatgatccagtaaggctttt

SEQ ID NO: 2278 - DNA, 277 bp, Glycine max
  unsure (1)..(277): unsure at all n locations; Clone ID: 700556177H1
tgaagattccacaacagtgggagggagatccanaaagagagagtggaaaanatggcgcggttgatcacagtggtntggtgcgcggtggcggtgctattatgcgccgcggccggtgcgtcgtgggtggaggaggcggcgaacccgatacgaatggtgtctggcgtggaggcggaggtggttcgggtgatcggggagtgccggcgtgcgttgaagtttgctaggttcgtgagcaggttcgggaagagttaccaaagcgaggaagagatgaaggagaggt

SEQ ID NO: 2279 - DNA, 281 bp, Glycine max
  Clone ID: 700556178H1
gtagcatcagtatctcggccactgaaaatatacttcctcccattcttctcaccggggcacctaatccctctggtccagctggctcgcttggtggcggcacgaggccagcacgtgaccatcatcaccacccccgccaacgctcaactcttcgaccagaacatcgacaaggacaccgcctccggccaccacatccgcgtccacatcatcaagttccccaacgcccacgtagggctaccggaaggcatcgagcacctctccgccgccaccaacaatgaaaccgc

SEQ ID NO: 2280 - DNA, 284 bp, Glycine max
  unsure (1)..(284): unsure at all n locations; Clone ID: 700556179H1
caacccatggccaccacctccgcattcctcctccttcncctcctcctgctgctccacctcgccatcgccgcttcacggcatcggcatcaactacggcacgctcggcgacaaccttccaccgcccgcggcggtggcgaacttcctgaagacgaagacgaccatcgaccgcgtgaagatctacgacgtgaacccggacatcctgcgggccttcgccggcagcggcatctccgtgacggtgaccgcccccaacggcgacatcgccgccttaaccaaaatcgactcgg

SEQ ID NO: 2281 - DNA, 253 bp, Glycine max
  unsure (1)..(253): unsure at all n locations; Clone ID: 700556180H1
ccttttncgtgtttatgcttcaccctttcatagatctgcctgaaaaaaacccctcaattccaaacccttgcgatccnatccaggtcaattaannnnnnnnnnnnnnnnnnnnnnnnnagaatgtcttcccaacgcgcagatctagcgtgccggatcttcccggagcccgatgcctccganatcgaccacttcgaccggttaccggactcgctcctccttttggtttncaacaagatcggcgacgtcaaagcnc

SEQ ID NO: 2282 - DNA, 283 bp, Glycine max
  Clone ID: 700556182H1
aaagcatgatggcaaaattgacaaggaagagtggagaaaccttgttttgcgccatccgtcacttttgaagaacatgacccttcaatacctcaaggacatcaccacaacattcccgagctttgtatttcattcacaagtagacgatacttgaagataatttctcccatggcttcttcctttgggctgcatggccacttttgtacaaaaaagggcatggcagacagccttgctttaccttacattgttatatctttgaataatgtattttgttttgtggatcttt

SEQ ID NO: 2283 - DNA, 286 bp, Glycine max
  Clone ID: 700556183H1
ttttcggtgtttgctttagaaggggagagtttggtctacacacaccaccacatgaagagcatggtgacgccattgacgagggtcttaccctttcgtcacccaaatggccataatacccttccattttctcttacacgctacccttcttcaccaaacttctccttctcccctctcactctcactctttccatggctgcttcaccccaatcctccgctccaactgtgtcgcctggtgatgttaacatcgacaaagatggtgtatttcaattgattcaagctcatcagg

SEQ ID NO: 2284 - DNA, 283 bp, Glycine max
  Clone ID: 700556184H1
tatcatcactgactgcttccctgaggtttgatggagccttgaatgttgatgtcaatgaattccagaccaaccttgtgccataccccaggattcattttatgctttcatcttatgctcctgtaatttcagccgagaaggctcaccatgagcagctatcagttggtgaaatcaccaacagtgcattcgagccatcatctatgatggccaagtgtgatccccgccatggcaaatacatggcgtgctgtctcatgtacagaggtgacgtagtgcctaaagatgttaa

SEQ ID NO: 2285 - DNA, 282 bp, Glycine max
  Clone ID: 700556185H1
tttgaacatcgttttgcagccatggaaacaggcatagcatgctacactcgcgggcctttcttgcctagtgtttcttccaagcactctccaccttccatttctccatcttttggcttgaggagtctgaaatcaagctctttatttggagaatcgctaagagtggcctccaaatcaacaataaaggtttcaaagacaaagaatacttcactcgtgaccagatgtgaaattggtgacagtctcgaagaattcctcacaaaagcaacaccagataaggggttgatc

SEQ ID NO: 2286 - DNA, 282 bp, Glycine max
  unsure (1)..(282): unsure at all n locations; Clone ID: 700556186H1
aacttttctctttctctcttcttcatgctcgagtgcttggtctcgctcctttacaaaaaaagctatggaccacaacatctaatctaatctnnnnnnnnnnnnnnnnnctcctcttaattattcttttgattctcaaattcttcttcggtttttttccctttctttttggtttcattgagtatgggttcggtggactgttatccttctcgtacggacgatgctgccgtggtgtctttggattcgctgcctttagggttccgattccgacccaccgacgaggaa

SEQ ID NO: 2287 - DNA, 264 bp, Glycine max
  Clone ID: 700556187H1
cttacttctaaagcaaaccagactgaagagagtagagaaagacttttttattacgttatccagaatgcgatgccccaaggcaagaaagtagcaatcggctttcaatcctatgattttactcgaatagctaatgtcagattttccataccgccggcaagagaaattattaaatggttcaggattaggattacgtcaattttcatgtgacacaagtttttcttagtttcggacaaagaatgaataaaacaaaattatgtgtcacgt

SEQ ID NO: 2288 - DNA, 276 bp, Glycine max
  unsure (1)..(276): unsure at all n locations; Clone ID: 700556188H1
attccaggtttccctcctttnccacttggtcactcatntnctccttcgccaatagnccatgttccgcttcccctccgtccttctctcccgcngcctccaccgccgagaactatcctcctccaccacctctnanncgccctccctccctctctcccaccccatctacctnatctggggctccaacaccggcgtcggcaaaaccctagtctccgccggtatcgccgccgccttcctcctctcctcncccancncctcccaattccactacctcaagcc

SEQ ID NO: 2289 - DNA, 259 bp, Glycine max
  Clone ID: 700556190H1
ggaaattaaaaatggaagacttgctatgtttgccatgcttggtttctacttccaagcttatgtcactggagaaggtcctgttgagaaccttgcaaaacatctcagtgacccttttggcaacaacttgctcactgtcatttctggatctgctgagagagctccaactctctaaatcattcatcttcatgtttttctccaatcttacttaatgtacaatacatatcactgagatattaaggcatttggctttgttccttgg

SEQ ID NO: 2290 - DNA, 259 bp, Glycine max
  unsure (1)..(259): unsure at all n locations; Clone ID: 700556193H1
ggaaattaaaaatggaagacttgctatgtttgcnatgcttggtttctacttccaagcttatgtcactggagaaggtcctgttgagaaccttgcaaaacatctcagtgaccctnttggcaacaacttgctcactgtcatttctggatctgctgagagagctccaactctctaaatcattcatcttcatgtttttctccaatcttacttaatgtacaatacatatcactgagatattaaggcatttggctttgttccttgg

SEQ ID NO: 2291 - DNA, 279 bp, Glycine max
  unsure (1)..(279): unsure at all n locations; Clone ID: 700556194H1
cgaaggtggtttgtgtcaccggagccagcggcgcccntcggatcatgggtggtcctactcctcctccagcgtggttacaccgtccatgccaccgtccaagatatcaaggatgaaaatgagacgaaacatttggaggaaatggaaggagcaaagagtcatctccatttttttgaaatggatcttcttgacatcgactccattgccgctgccataaagggttgttccggcgtaatccaccttgcatgtcctaacatcatggtcaagtcgaagatcccgaga

SEQ ID NO: 2292 - DNA, 282 bp, Glycine max
  unsure (1)..(282): unsure at all n locations; Clone ID: 700556195H1
gccccttctgccctccccagccattaactgaaaaaaaaaaccaaaaaaccaaaaatactacaaatttttttcagtttctccgccgccgcacaaccaccacctcctccgttcggatctccggcggacctantatncctactactactctactctatttacacggaagaacaaaaaactatnnnnnnnnnnnnnnnnnnnccccaaagcggctcggttagggtttagttttgtaccatttcgtgtaatctaatttttcatccgtaaaaatctaattttgaggcg

SEQ ID NO: 2293 - DNA, 285 bp, Glycine max
  unsure (1)..(285): unsure at all n locations; Clone ID: 700556196H1
aaagccatggncacctccaacttctctattgttctctccgtctccctanccttcttntnggtgctacttaccaaggcacactgcgaccgataccgnttctttcaccttcaacaagttcaacccagtccaaccnaacattatgctccaaaaagatgctagtatttcatcctctggggtgttacaactcaccaaagttggcagcaacggcgtgcccacctcgggatctctcggtcgtgccctttangctgccccaatccagatttgggacagcgaaaccggcaaggt

SEQ ID NO: 2294 - DNA, 96 bp, Glycine max
  unsure (1)..(96): unsure at all n locations; Clone ID: 700556201H1
caagcataagcacaagcacaagcacagagcagcttgctnctaattcccctttgcagcacngcnattagcagatttncngcagagtgccttanactt

SEQ ID NO: 2295 - DNA, 270 bp, Glycine max
  Clone ID: 700556202H1
ggagaattagagttgccacctgggttcagatttcaccccactgatgaagaattggtgaatcactacttgtgtaggaagtgcgctggtcaaccaatcgcggttcccgtcatcaaagaggtcgatttgtacaagtttgatccatggcagcttccagaaattggtttttacggcgagaaagaatggtacttcttttctcctcgggaccggaaatacccgaacggttcacggccgaaccgcgccgccggaagcggctattggaaagccaccggc

SEQ ID NO: 2296 - DNA, 266 bp, Glycine max
  unsure (1)..(266): unsure at all n locations; Clone ID: 700556204H1
ccacgcgcanagctaaaaccgcgatctctcgaactcttgaggggcgttccacttcttgtttnangggcgctnccacttcttgttataggcggcttcttnctcgtnggatganctggtngatatnttgaacgtgccagtggccttgntgatagccgactcggcgtggtccaagagccaccggatgggtcttgncgtcgaacttgtggtcgatntcttnggtnanctgnaagatccgggcgacgcaggcgttantctacngcattngt

SEQ ID NO: 2297 - DNA, 267 bp, Glycine max
  Clone ID: 700556205H1
gagaactgtaagttgctgttagttgacaaaaagataaccaatgcaagggatcttatcaacatactggaggatgctattagaagtggataccctatattaattattgctgaggatattgaacaagaaaagcagcaacaatgtcgggtcgcggaaagggtgggaagggtttaggaaagggaggagcaaagaggcatcgcaaggtgctccgcgacaatatccagggaatcacgaagcccgcgattcggagactggcgagaagaggtggcg

SEQ ID NO: 2298 - DNA, 267 bp, Glycine max
  Clone ID: 700556206H1
gagagacaagtatcgattattgatctgaaacgaaaaaaagagcaacaactgtgaaatctgtggaatcaaaggggcaagctgagaagtgtgccaagagaaagaggaagaaccagtatcgcggaatccgccagcgtccatggggaaagtgggctgctgagattcgcgacccaagaaagggggttcgtgtttggcttggaactttcagcactgctgaagaagctgcaagagcttacgatgctgaagcaaggaggatccgtggcaagaaag

SEQ ID NO: 2299 - DNA, 95 bp, Glycine max
  unsure (1)..(95): unsure at all n locations; Clone ID: 700556208H1
gccnaaacnctgcgtttnttnctacaatacaagaaaaaaaaaatgtcngacngaagncngggttggatggtctntctgcagggatgccctgccgg

SEQ ID NO: 2300 - DNA, 272 bp, Glycine max
  Clone ID: 700556209H1
ttcttcttcccttttctctcttctctctctttctccggcgacgatctcagattccggtccactcctgctcgccggcgatcccttattcctccgtcctccgtcgagtcctttccgattcgaatcgttcccagccttgtgccaccatgaatcccgaatacgattatttgttcaagcttttgctgattggagattctggtgtaggcaagtcatgtcttctcctgaggtttgctgatgattcataccttgacagctatatcagtaccattggagtg

SEQ ID NO: 2301 - DNA, 272 bp, Glycine max
  unsure (1)..(272): unsure at all n locations; Clone ID: 700556210H1
gcgattcttgttctgcnnaaggaatcctgccgtagccagaagcaggttcgagaaattcaagcgcagtgcattcctccagaanatctacccaaanaccagagtcgctcaacacttcatcggtgcgtgccaatcacacggccttctcancactgcncttgtnctcntcaccaccctcctccnccacccccacgtctannnnttcaacaccctcatcagagtnttctcccaatcccttaccccgcacaccnntctntnnnnctacacgcacatgg

SEQ ID NO: 2302 - DNA, 269 bp, Glycine max
  unsure (1)..(269): unsure at all n locations; Clone ID: 700556211H1
cactaccactaaagtttacattgtttactattctatgtacggacatgttgagaagctagctgaagagattaaaaaagganntgcttctgttgaaggagtagaagcaaagctatggcaggtacctgaaacactgcctcaagaggtccttgggaaaatgggagcacctccaaagagtgatgtaccaattattacacccaacngagctacctgaggctgatggcttattgcttggtttccccacaagatttggactgatggctgctcaattc

SEQ ID NO: 2303 - DNA, 269 bp, Glycine max
  unsure (1)..(269): unsure at all n locations; Clone ID: 700556212H1
gagcatcacaaaccctagaaaatcgttccagatgaatacaaaatcgctccaaatcctggtgcactcaccggacctcggaatttcccttcaatccacaaccaaccacgaaaccctttccgatctcaaaaactctcttttccctcaatcacaccaatccttctacttcaccttcaatggcaaacccctccccgacaaaacccctctttcccaattcccccctctctccaccctctctctccgctcccgcctccttggnggcggcggagagg

SEQ ID NO: 2304 - DNA, 268 bp, Glycine max
  Clone ID: 700556213H1
acgacattcattcatctatggctacccttattgctcccagcaaccactctccccaagaagacgctgaggctctcagaaaggcttttgaaggatgggggactgatgagaaaactgtcatagtaatattgggtcatagaactgtttatcagaggcagcaaatcagaagagtctatgaggaaattttccaggaggatcttgtgaaacgcctagagtctgagatcaaaggagactttgagaaagccgtgtaccgatggatactagaacctgc

SEQ ID NO: 2305 - DNA, 271 bp, Glycine max
  unsure (1)..(271): unsure at all n locations; Clone ID: 700556214H1
ggggagaacgaattgagcagagtgtttcaaggatgatgacaataattgatctagccagaaacattcgtgagcgtcacaacaagcctcttaagactccactaagggagatggttatagttcatcccgatgcagacttccttgatgacataaatggaaaattgaaggagtatgtgctggaggaactcaatgtacgatcccttgtaccatgtaatgatacttnaaaatatgccactttacgcgccgagcctgaatttagtgttttaggcaaaag

SEQ ID NO: 2306 - DNA, 272 bp, Glycine max
  unsure (1)..(272): unsure at all n locations; Clone ID: 700556215H1
agaacctgaatgggagggttctcctggcttgacccagaaatctggaataatctcaacattgatcagcactaccttctcaagtccacaaaagccaccgccaccacggccatctgatgtaaacatcaactctgctttataccctggggggcntcctgtgcctactcagtcacccaaacttctaaggtttgttgacacaactgaaatgacaagaggaccacaagatactcctggctactgggttgtgtctggggcaaggctttttgtggagaagg

SEQ ID NO: 2307 - DNA, 77 bp, Glycine max
  unsure (1)..(77): unsure at all n locations; Clone ID: 700556216H1
tgtgaatatggttagctaaatttgaaagaacttttattgtgtttanngaaattaaaccggcatttataaagagaaat

SEQ ID NO: 2308 - DNA, 265 bp, Glycine max
  unsure (1)..(265): unsure at all n locations; Clone ID: 700556221H1
cgaaagattttatccaatnganattttaaaaatgactgggataaacttaaganttcaattattgaaattgaataagtagacaatttaattggattggtcgaatggnatcanaaaaatggagtactaactcccatttcttatttattattgantnaaccgatcnacttgctttgtnatcgaacatttcttgttgattncaaaaatttnccggaaaanatttgaatctantnttatatgcgaatcaatcctactacttctggtcctg

SEQ ID NO: 2309 - DNA, 257 bp, Glycine max
  unsure (1)..(257): unsure at all n locations; Clone ID: 700556222H1
atcctcattgataatgatcttggtaattgttcacagaaccactgtgtgcagtttgaaacagctacaggcatggccttcatttgttggttcaccacagtgccatcttttctcctgaacttctggnccttagcatcacggtaattaanaacagtnacacgcagaaacttggacagcttgtaaagttaatgttggtgtcaggggtttggctgttttgtttgncacctgtcaaagttttctatgcttcatgccatgtggta

SEQ ID NO: 2310 - DNA, 258 bp, Glycine max
  unsure (1)..(258): unsure at all n locations; Clone ID: 700556224H1
acgacattgtgtttatggtccaaggaccgttagatctatgctggctagantggagaagctgccgcagagatcttggcccaaagaccggatatggtcattcanaagttctccgaaattctttggtagcccaatgttagatgctgtagttaataactctccgctggacagggagatggttcattggtttaagcacagacctgccatattccaagccatgtgggatcgttaanattttgcatggtttgnggaatttnggtc

SEQ ID NO: 2311 - DNA, 137 bp, Glycine max
  unsure (1)..(137): unsure at all n locations; Clone ID: 700556225H1
ggccaaagtatacaagttcattctagtgtaatgaggtcagatgttcagagggctatagacagctgacattataccganatccgcgtggatctcttaacctgatattcgtcacgtcacacaatggatactcttgttta

SEQ ID NO: 2312 - DNA, 267 bp, Glycine max
  unsure (1)..(267): unsure at all n locations; Clone ID: 700556226H1
caaggatagagatcaggatagagatagagaccgttatagggatgatgggatgaaagaaagggaccgtgaattccgagaaagggacaaatctactgcgattgccaacaaggatgttttaggttctaagatntctctatatcccagcaaggagaagtatttatccaaacctataaatgagctggacctttctaactgcgaccagtgcactcctagttaccgtctcttaccgaaaaattacccaatacctgtagctagccagaaaacaga

SEQ ID NO: 2313 - DNA, 269 bp, Glycine max
  unsure (1)..(269): unsure at all n locations; Clone ID: 700556228H1
aagggattctgtttgctgcaatcggattcactccgcagctgcagcactcaaaaccctagagaggacgagagagcgtgcaactttcggcaaccacagaccatgacattcaagcgcaggaatggaggtcgcaacaaacacggccgcggccatgtcaaattcatnccgatgctccaactgcggaaaatgctgccccaaggacaaggccatcaagaggtttttggttaggaacattgttgaacaggctgcagtcagagatgtgcaggaagctt

SEQ ID NO: 2314 - DNA, 272 bp, Glycine max
  unsure (1)..(272): unsure at all n locations; Clone ID: 700556229H1
angcccacaatcataacaaccaaaaagcccccttctcnttncaacccctccagtttcaannaacanttgcnctaagcatcgttgnnacaaggntacancanaanaggttttgttagttcctcaccaagcgatgaganttcccgttccctcatccccanaggccaacccanancccancaatancgttgtccgtaccattgcncttcccaacctcaacaatagcaccacgccccccacgggcctgtgctacgagcccacttcngtccttgacc

SEQ ID NO: 2315 - DNA, 270 bp, Glycine max
  unsure (1)..(270): unsure at all n locations; Clone ID: 700556230H1
ctcttcctcagtagtgcgattttcgattctcttctctgcanctatgcctaaccctaaggtcttcttcgacatgaccatcggcggtcaacctgccggccgcatcgtgatggagctctacgccgacgtgactccgagcaccgccgagaacttccgcgngctctgcaccggcgagaagggcgccgggcggagggcaagcccctccactacaaaggctcgtccttccaccgcgtgatcccgaacttcatgtgccagggcggcgacttcaccgcg

SEQ ID NO: 2316 - DNA, 177 bp, Glycine max
  unsure (1)..(177): unsure at all n locations; Clone ID: 700556231H1
ccctaagttaaagatgtggccaccattctgcattggaagctataggggccatgcttagaggtcgtgtgtatctgcaatgaagaggcctagccaccttcatcaccatatgatattnataaaaatatatntntatgaaactatgaactgcgtttatgcatgtcggaaaatctncttttg

SEQ ID NO: 2317 - DNA, 277 bp, Glycine max
  unsure (1)..(277): unsure at all n locations; Clone ID: 700556232H1
caggaaggaaaaatggagtngtncttctacgcggtgttcggcggtttgggagcggttgttgcagtgacggagcctgagcaagatcaacaaggaccgaatcaagcacctctnncgcatncaatgccttcaataacaactacctcatcgtctattccctcatgatggctggagattggctacaaggtccatatgtnctactacctttacagtactatggatatgggaagggagncataggacaactnttccattgcaggtgtnnggtctccatgctctt

SEQ ID NO: 2318 - DNA, 175 bp, Glycine max
  unsure (1)..(175): unsure at all n locations; Clone ID: 700556233H1
agaaaagaaccctcaattttncgggaaaaccctccccacaatggtttcccgggaaaacaccaattggctcttcgattacggcttgatcgacgatattcccgttccggacgccaccttcggcgtcaattcctccgccttcacatggccccctaacgccttgaacgcttcctccaat

SEQ ID NO: 2319 - DNA, 268 bp, Glycine max
  unsure (1)..(268): unsure at all n locations; Clone ID: 700556235H1
gtnccattcctccaaactcaaattacacatacaagtttcaggccaaggatcagattggtacatatacatactttccatcaactcaactgcataaagcagctggagggtttggagcactgaatgtttatcatagatctgtcatcccaatcccttatccaaaccctgatggagattttactttactcgttggtgattgntacaaaaccaaccacaagacgctaaggcaaactttagaatctggaaaacctcttgcatttcctgatggcct

SEQ ID NO: 2320 - DNA, 269 bp, Glycine max
  unsure (1)..(269): unsure at all n locations; Clone ID: 700556236H1
tntagacacctctgcaagtgcaaactccttcaccaacttcaccttctccacacaccctttcatgncccacttctttctctgacctccttgcttctcccttggacaacnacaagccaccacanggtggtttgtntgagagaactggctctggtgttcccaaattcaagtccacaccaccaccttctctgcntctctctcaccctcccatttctcctncttcttactttgctattcctcctggtttgagccctgctgagcttcttgantcg

SEQ ID NO: 2321 - DNA, 170 bp, Glycine max
  unsure (1)..(170): unsure at all n locations; Clone ID: 700556237H1
gcacgattcatttatctatctgcttctcttctctttgctcaacacnatctatatctatctcactcatncagacaccaacacatcctcatgtgtctaattctaccttgcttgtatttgtagcgctattactccttgctgtgtaaatggcacatgttgatgttatncgatta

SEQ ID NO: 2322 - DNA, 75 bp, Glycine max
  unsure (1)..(75): unsure at all n locations; Clone ID: 700556238H1
aaagctttcggtgatattctngaattncntagannagtgtgtanncacttcgctggtcggaattacntncggatt

SEQ ID NO: 2323 - DNA, 267 bp, Glycine max
  unsure (1)..(267): unsure at all n locations; Clone ID: 700556239H1
agaaaaaanaaaacccttancnanacncaaccatcatggccacctctgctattcagcaatgcagcattcactggtnaaactgctntgaagcagctnaatgagttcgnccgcaagaccggtggcgccggcaaaggtcgcactaacatgcgncgcaccgtcaanagngctcctcagngcatttggtatggccctnaccgtcccaagtacttgggtccattctcggngcagatnccatcatacctgaccggagaattccctggngatacg

SEQ ID NO: 2324 - DNA, 90 bp, Glycine max
  unsure (1)..(90): unsure at all n locations; Clone ID: 700556240H1
aggcttatggtnnatacctagtgcacaccagagagcgaggaaggcncgtcagtaagcnacnaaatgncntcggggncgttccaaacatgc

SEQ ID NO: 2325 - DNA, 267 bp, Glycine max
  unsure (1)..(267): unsure at all n locations; Clone ID: 700556241H1
gcatatcatgtgactgagccgcgtcctgatggggctggtgttattctttgcattgaaanggcattagctcagtctggagtatcaaaagaggatgtgaattacataaatgcacatgccacatccacaccagctggagatcttaaggagtaccaagctctaatgcattgttttggtcaaaaccccaagttacgagtgaattctacaaaatctatgattggtcatctactaggggcagctggcgctgtggaagctgtggccacaatacag

SEQ ID NO: 2326 - DNA, 267 bp, Glycine max
  unsure (1)..(267): unsure at all n locations; Clone ID: 700556242H1
cttctctgtttatggcaaaaaccctgagaaattcangtgnctgttgaacagttacatgtcttctgtgaggaagatggcatgtgagattcttgagttgatggcagaagggttgaagattcagcaaaaggatgtgtttagcaagcttctaatggataaacaaagtgactctattttcagggtgaatcattacgctgcttgtcctgaaatgactctgaatgatcagaacttgattgggtttggagaacacacagacccacaaatcatctc

SEQ ID NO: 2327 - DNA, 84 bp, Glycine max
  unsure (1)..(84): unsure at all n locations; Clone ID: 700556243H1
cganaaaaaaaagattgcgatagaaactanagaaaataaagcaaattgnttcgccgagaaagaggagagagagggatttcgaac

SEQ ID NO: 2328 - DNA, 265 bp, Glycine max
  unsure (1)..(265): unsure at all n locations; Clone ID: 700556244H1
cttctctgtttatggcaaaaaccctgagaaattcaggtgnctgttgaacagttacatgtcttctgtgaggaagatggcatgtgagattcttgagttgatggcagaagggttgaagattcagcaaaaggatgtgtttagcaagcttctaatggataaacaaagtgactctattttcagggtgaatcattacgctgcttgtcctgaaatgactctgaatgatcagaacttgattgggtttggagaacacacagacccacaaatcatc

SEQ ID NO: 2329 - DNA, 271 bp, Glycine max
  unsure (1)..(271): unsure at all n locations; Clone ID: 700556245H1
agaccaagccccactcaaccancacaccantctactctgctcttcttctacctttcaagtttctaaagtatnaagatggcagagacattcctattnacctcagagtcagtgaacnagggacaccctgatcaagctctgcgagccanatctccgatgctgtcctcgacggcttgccttgaacaggacccagacagcaaggttgcctgcgaaacatgcaccaagaccaacttggtcatggtcttcggagagatcaccnccaaggccaacgttg

SEQ ID NO: 2330 - DNA, 151 bp, Glycine max
  unsure (1)..(151): unsure at all n locations; Clone ID: 700556248H1
ggccaaagtatacaagtncattctagtgtantgaggtcagatgttcagagggctatagacagctgacattataccgaaatccgcgtggatctcttaacctgatattcgtcacgtcacacaatggatactcttgtntataatgttacattnc

SEQ ID NO: 2331 - DNA, 269 bp, Glycine max
  Clone ID: 700556249H1
ctttgaacatcgttttgcagccatggaaacaggcatagcatgctacactcgcgggcctttcttgcctagtgtttcttccaagcactctccaccttccatttctccatcttttggcttgaggagtctgaaatcaagctctttatttggagaatcgctaagagtggcctccaaatcaacaataaaggtttcaaagacaaagaatacttcactcgtgaccagatgtgaaattggtgacagtctcgaagaattcctcacaaaagcaacaccag

SEQ ID NO: 2332 - DNA, 266 bp, Glycine max
  Clone ID: 700556251H1
ggagacgataaagaactttgcggtgatatacctggtggacataacggaggtgccggatttcaacaccatgtacgagctctacgacccttccacggtgatgttcttcttcaggaacaagcacatcatgattgatctcggaaccggtaacaacaacaagatcaactgggctctcaaggacaagcaggagttcatcgacattgttgagaccgtctatcgtggagccaggaagggacggggtctcgtcatcgctcccaaagattactcca

SEQ ID NO: 2333 - DNA, 264 bp, Glycine max
  Clone ID: 700556252H1
cctgtttcttgcactcatagcattgtcagtaggatgatgatcaatgaggagcttcatgcaagctgggaccagccaactgggtgcattcttttccaagattttgaacactctaggctgcaggccttggcattccagttgacagagaaattatctatccttgcagagagtaatgaaagagcaacagaggcaaggataggtggtggtggattggatctgcctctaaggcgcagagatggccaggactatgccgctgccgctgctggt

SEQ ID NO: 2334 - DNA, 235 bp, Glycine max
  Clone ID: 700556254H1
aaagaatggtacttcttttctcctcgggatcggaaatacccgaacggttcacggccgaaccgtgccgccggaagcggtattggaaagccaccggcgccgataaggcgatcggaaaaccgaaagcgctagggatcaagaaagctctggttttttacgccggaaaagcccccaaaggagtgaaaaccaattggatcatgcacgaatatcgcctcgccaatgttgaccgatctgcctc

SEQ ID NO: 2335 - DNA, 84 bp, Glycine max
  unsure (1)..(84): unsure at all n locations; Clone ID: 700556255H1
gcatntgaaacgactcatttatnactatcnccgcccaaccgcgttccangctcaagcgcttcttcttactgctgcttcgaatcg

SEQ ID NO: 2336 - DNA, 267 bp, Glycine max
  Clone ID: 700556256H1
gtcaatggctgcaactctcactgctgtaagaattcccactttccaccaacgccatctcaaacaacacttcacggcaccctcttcctcttccttacgcctcctcaatctcgcaaagatggaaggaagtgagatcagtgagcaagtagtaggggaggatttgggagcaaagaagaaagtttttgtagctggagccactggtagcactggcaaaagaatcgttgagcagttactggcaaagggttttgctgttaaggctggggttagaga

SEQ ID NO: 2337 - DNA, 265 bp, Glycine max
  unsure (1)..(265): unsure at all n locations; Clone ID: 700556258H1
ctgagttttgacaacttgcctgtggatattcaacacctacgttgtaaagtaaacttccaagctttaacctttgtttnccatatcagaacacttggagatgcccttatcagccgccttcgctatcctcaaggctcagctgaagaaatgggcttcaactaccttcaagaggtcactggtgcaggtgctaggaaaaatgcagggaaatttgttgttctacacctccgatttgataaggatatggcagcccattcggcctgcgattttg

SEQ ID NO: 2338 - DNA, 265 bp, Glycine max
  Clone ID: 700556259H1
ctcgcaccaacaccagcacttcaaagaagacagaatcaagcagaacttggagttggagagagagaattccgaccctaattgtaaaatggaggacgagacagagactatggtggagaagagggagataatcaacaacgtaatgtgtcttttgacagaccctgatggaactcctttgggtgctcctatgtacctacctcagaatgctggtcctcaacacctcatccagattgttaataagcttctaaacaatgaggagaaattgccg

SEQ ID NO: 2339 - DNA, 267 bp, Glycine max
  Clone ID: 700556261H1
caactacaaaggttgctgtaggagataagatattgaagtagtgctaagtgcctaacacctgcagtgaacaatggcctctgcatcagcatctcttctcaagtcttcacttgttcttgacaagtctgagtgggtgaagggacaaacacttcgccaaccttctgctgcatcagttgtgagatgcaaccccaccaccccatcaggcctcaccatcagagctggttcctatgctgatgagctcgttaagaccgcgaaaacagtggcttcacc

SEQ ID NO: 2340 - DNA, 272 bp, Glycine max
  Clone ID: 700556263H1
ggcaaaagggtttcctagtctgaaggtgttaggccttgatgatttagatggactgaaatcaatgactgtggaggagggagcaatgcctggtcttaaaaagctcatcatccagcgctgtgattcattgaagcaggtaccattaggcattgaacacctaacaaaactaaaatcaatagagttttttgatatgcctgaagaattgattacagcactgcgtccaaatggaggtgaggattattggagagtacaacatgtcccagcagtttatatct

SEQ ID NO: 2341 - DNA, 276 bp, Glycine max
  unsure (1)..(276): unsure at all n locations; Clone ID: 700556264H1
gggcaaaagggtttcctagtctgaaggtgttaggccttgatgatttagatggactgaaatcaatgactgtggaggagggagcaatgcctggtcttaaaaagctcatcatccagcgctgtgattcattgaagcaggtaccattaggcattgaacacctaacaaaactanaatcaatagagttttttgatatgcctgaagaattgattacagcactgcgtccaaatggaggtgaggattattggagagtacaacatgtcccagcagtttatatctccc

SEQ ID NO: 2342 - DNA, 171 bp, Glycine max
  Clone ID: 700556266H1
gtgatatagaagaagatgaaagtggatgggaaactgtgagccatgttgaggatcagggatcaagttgttcgcctgaagggagtgccctattggtgaacaagaatcgtcgagagagtgatgtttcagggaggagtgtgcttgaatgggaagaaaatgcaggtttagagactc

SEQ ID NO: 2343 - DNA, 243 bp, Glycine max
  unsure (1)..(243): unsure at all n locations; Clone ID: 700556267H1
gangggtattcgaagaaganaccatgaatctcctctccctctaaantnctctctcagattcgatcctctcttctcttctttcaattccgctccctcgcacgaaaatgacagggtttcctcaacctcgccgcgatcannnnnnnnnnnnnnnnnnnnnnnnnnngcacaattccaacagcagtggtagcnatgtatttnatttgcttgcaaggagggagatctcgcctcgatcaagatatgtgg

SEQ ID NO: 2344 - DNA, 264 bp, Glycine max
  Clone ID: 700556268H1
ctttctattctttcttcttcttcacttcaagacagcaaaatgaacgatcttatgaccaaatccttcaccagctacgtggacctgaagaaggctgcaatgaaagaagatgttgatttggaagctggtgttgttgtttcttctgctactcctcgcaacgtggaacttacctcttccacaacacacttggacaccgacatgggtctcttcctcgaagaggctgagaaggtgaaggctgagatggggtccctccgtgacatcctcggc

SEQ ID NO: 2345 - DNA, 261 bp, Glycine max
  Clone ID: 700556271H1
aagcactatgttcatatattgacaaggatcgtccatttctgggcatttgtccttggacttcaactactttttgaatctagtgaggagaatggaccagtaaaaggtcttggcttaatacctggaactgttgggcgatttgactcatcaaatggttttagagtaccacatattggctggaatgctttacaaatcactgaggactcgggaattttggatgatgttggaaatcaccatgtctattttgtgcactcttatcgtgcc

SEQ ID NO: 2346 - DNA, 265 bp, Glycine max
  unsure (1)..(265): unsure at all n locations; Clone ID: 700556272H1
ctccgttttggctctcaccaaccacagattnccccttctctgtgtcttcctgcgcgtnaccaaatttgattttancttttctctctttatattcttctcttcaaattctgatactttctacgccggccactcagtttctctttcgtttntctttntctnttctntctttctttcgttcacttatcctatnagtattatttcccagtcggtttctacattcnctctggtttgttcctnccaccgactgctagnntncgttaanacc

SEQ ID NO: 2347 - DNA, 265 bp, Glycine max
  Clone ID: 700556273H1
ggaagatctacctgggctgctttttggttgattttacttggcgtagttatgattgctggtggggcattccttgtgtacaagtacagaataaggcaatacatggattcagaaatcagagcaatcatggcgcaatatatgcccttggacagccaagcagaagttccaaatcatgtcaatgatcaaagagcatgaaggcaaaaatgggccaatcccttggaatttcacggcaggcagcatgggtgtgacttttcctgtgccattttga

SEQ ID NO: 2348 - DNA, 258 bp, Glycine max
  unsure (1)..(258): unsure at all n locations; Clone ID: 700556274H1
ctcgagcgtatnaggnatttctcactgataacgctgcttcctttaatgctctcatantatacatagagcaccgttactatgggaaatcagtaccatttggatcgagggaagaagcactgaagaatgcaagcactattgggtatttcaactcagctcaagcaatagcagattatgcatcagtcctcatacatattaagaagacattacatgcccaaaagtccccggtgattgtgattggaggatcatatggaggaatgc

SEQ ID NO: 2349 - DNA, 262 bp, Glycine max
  unsure (1)..(262): unsure at all n locations; Clone ID: 700556275H1
ctcgagcgttttgatagtttnagaacagaattcagcagtgaaattgaactttnggccaaaattgatcatcgaaacctggtgaagctactaggttatattgacaaaggaaatgaacgccttcttattacagagtttgtgccaaatggtacccttagagaacatttggatggtatgcgtggaaaaatcctagacnncaatcaacgcctcgaaattgcaattgatgttgctcatggcttgacctatctgcatctgtatgcagaaa

SEQ ID NO: 2350 - DNA, 266 bp, Glycine max
  Clone ID: 700556276H1
cagcaccaacagttattcacaaaagtcctccggcaccacctgattccacagcagaatcagacacaacaccagcaccatcaccaagtctgaatttgaatgctgcaccatcaaaccaccagcaaaggagtatacaggcaacggctgcacttgccatcactgttttgctagccgtcaccagctacagctgctagcagcctcatggagaccatggattcactttaatgagttatttggcttgcaaaatatataatcatttaatgtgtata

SEQ ID NO: 2351 - DNA, 264 bp, Glycine max
  Clone ID: 700556277H1
gtcgtacggcgtccccgcgaaacggcggtggagagggctcgtaattgcggtgctcggtcttgtcattctctccatgctcgtccctctcgtcttcttgctcggtctccacaatggtttccactcctccggatatatatatgaacagaagaatactccttcgaatgagaaaagtcttgaaagatatgatagacatgatgttggccataatgagtctgagggagaacaatcaagtcatgtggaggatcttatcacaaagtttgaacc

SEQ ID NO: 2352 - DNA, 267 bp, Glycine max
  Clone ID: 700556279H1
gcgcaatgtagattagagaaatttaattagtgtaaatttgtttgtgataagtaatgttttctagggtgtactgtagatattcattccctgcgccggtggttctcagttcttgacaactgggaagggtcggggaaatgttttaatttgtatccgagcatccaacgctgacaagaggtggtttaaccggtgcatgaccatgatgtagtcttaatgttgaagtcttaatttttatttatttttgttaaactttggttctgtcgctagtaa

SEQ ID NO: 2353 - DNA, 273 bp, Glycine max
  Clone ID: 700556280H1
actgaaagcactcagtagggtttgcggtttcagagtttgtgacgcacgcatccatggccaccaccaccaacgccgccgcagccccgccgcgccagtctcccagaaggaagccgacatccagatgatgttagccgccgacgtccacctcggcaccaaaaactgcgacttccaaatggaacgttacatcttcaagcgccgcaacgacgggatttacattattaaccttgggaagacatgggagaagcttcagttagcagctagggttattgttgc

SEQ ID NO: 2354 - DNA, 267 bp, Glycine max
  Clone ID: 700556281H1
gaaatggcaacagaaacaaaagtgcaagaattaggtggcatcaccgatgtgcatggagctgccaacagcgtcgagatcaacaatctcgctcgctttgctgtagaggaacaaaacaaaagagagaattcagttctggagtttgtgagggtgattagtgcaaagcagcaagtggttgctggagtgaattactacataacattggaagcaaaagatggtttgattaaaaatgagtatgaagcgaaggtttgggtgagggaatggttgaac

SEQ ID NO: 2355 - DNA, 266 bp, Glycine max
  unsure (1)..(266): unsure at all n locations; Clone ID: 700556282H1
gatcancaagaacctcaaccaggatgagtttgaggcactgctccaggagttcaagactgactacaaccagacacactttgtgaggaacaaggagttcaaggaagctgctgacaaacttgaggggccactcaggcagatctttgtggagttccttgagaggtcctgcactgctgaattctctggcttccttctctacaaagagcttggaaggaggctcaagaaaaccaaccccgtggtggcagagattttctctctgatgtctaggg

SEQ ID NO: 2356 - DNA, 263 bp, Glycine max
  Clone ID: 700556283H1
caaggatcctagtctttggttggtatgcacatgtgaatcttctcaaggggactcttgtgggttgtcttgccatattgagtgtgctcttcaacatgaaaaagtaggagttgttgatcatggacaactgatgcaactagatggtggttattgttgtgcatcctgcggtaaagttactgggatacttggatgttggaagaagcagctaaatatagcaaaagatgcccggcgtgtagatgtactatgctacagaatatatttgagct

SEQ ID NO: 2357 - DNA, 262 bp, Glycine max
  unsure (1)..(262): unsure at all n locations; Clone ID: 700556284H1
gccaaatgaagactagcgtgaccgagactagtgcagctgaacttgcgaantgctttattggttgatggtggttgggtacagcatacgcaatattgaagttcgttatgacatggaaagagtacttggcacccctccaaagctagctgaattgccgccaggtgaaaatgtttaagcagtctggagtaaagtagttcaacaaagtactggtgtctcttagttgaagccaagtgccctaattagattttgcactttttttgttgat

SEQ ID NO: 2358 - DNA, 262 bp, Glycine max
  unsure (1)..(262): unsure at all n locations; Clone ID: 700556285H1
actttggctgccatggtgggttgccatcacaagcctttgagtacattaaatacaatggtggactagagacagaggaagcatatccctacacaggaaaagatggtgtctgcaaattctcagctgaaaatgttgctgttcaagtccttgactctgtgantatcaccttgggtgctgaagatgaactaaaacatgcagttgcatttgttcggccagttagtgtggcctttcaggtggtgaatgggttccatttctacgagaatgg

SEQ ID NO: 2359 - DNA, 264 bp, Glycine max
  unsure (1)..(264): unsure at all n locations; Clone ID: 700556286H1
ctcttggcttgtgaatcagcnccacattcacctgagcttnttgtgaggattccaaagcatggcttcccttggcagcatccactgctgctgcttcccttggcatgtcagaaatgcttggaaaccccatcaacctcagtggtgccacaaggccagctccatctgcctctagccctgcctccttcaagactgtggctcttttctccaaaaagaaggctgcacctccaaaaaaagctgcagctgctgctcctgccaatgatgagcttg

SEQ ID NO: 2360 - DNA, 265 bp, Glycine max
  Clone ID: 700556287H1
gttccaaacaaaacccatcaaagtctttctccctcagtgatcatatattcattcagttctatacaaaatcctcaaaaactcttcctctctgccatgaccatggaatacagaaccttagaactcaacatcatatccgcaaaggacatcaagaatgttaatctcttctccaagatggacgtatacgccgccgtttcgctctccggtgaccctctccaccctcagggcgccaccacccacgtccacaaagacgccggcagcaacccca

SEQ ID NO: 2361 - DNA, 256 bp, Glycine max
  unsure (1)..(256): unsure at all n locations; Clone ID: 700556288H1
ccgagtttgaaatcatcgccaacgaccaagggaacagaacgacgccgtcanacgtcggcttcactgataccgagcgtctcatcggtnatgcggctaagaaccaagtcgccatgaaccccatcaacaccgtcttcgatgccaagaggttgattggtcgtagattcagtgactcctctgttcagagtgatatcaaattgtggccttttaaggtcattgctggtgctgctgacaagccantgatcgtggttaactacaa

SEQ ID NO: 2362 - DNA, 256 bp, Glycine max
  unsure (1)..(256): unsure at all n locations; Clone ID: 700556289H1
cagccacagccacaggtgtatgaacagcaatatcctncagccacagccactgctgctttaaggtccaaagttggaagtactgtcaactttggaccttaaagcaccattgagggatgagacccatcaacagccacagccacagccacaggtgtatgaacagcaatatccccagctgcagcagtggctgtggctggcaggcattgtcacatcgtgtgagttacgtgtgggttgtggaagaggntggaaccntgacngg

SEQ ID NO: 2363 - DNA, 169 bp, Glycine max
  unsure (1)..(169): unsure at all n locations; Clone ID: 700556292H1
gttctgtgctgcgcggacgaggcagcactgtgctgggaatgcgacgagaaggttcacgcagcaaacaagctcgccagcaagcaccagagggnnnnnnnnnnnnnnnnnnnnnnnnnnatgcccaagtgtgacatatgccangaaatggttggttattnccttctgttta

SEQ ID NO: 2364 - DNA, 268 bp, Glycine max
  unsure (1)..(268): unsure at all n locations; Clone ID: 700556293H1
caaccaccacacaattcctacacatttctactcnttagtttctccaattttctttctcaattgctcaacaatggccactacaacacaacttcacttaccccctggattcagatcccatccaacagatgaagaactcgtcatccactacctttgtcgcaaatgcgcttcgcaacatatcgcggttcccataatcgccgaaattgatctgtacaagtacgacccttgggaccttccaggaatggctttgtacggagagaaagagtggtat

SEQ ID NO: 2365 - DNA, 170 bp, Glycine max
  unsure (1)..(170): unsure at all n locations; Clone ID: 700556294H1
ctccgttttggctctcaccaaccacagatttccccttctcngtgtcttcctgcgcgttaccaaatttgattttacctntnctctctttatatncttctctncaaattctgatactttctacgccggccactcagtttctctttcgtttttctgtgtcttatctntctttc

SEQ ID NO: 2366 - DNA, 269 bp, Glycine max
  unsure (1)..(269): unsure at all n locations; Clone ID: 700556295H1
ggtgtgcagaagagcgtcgcagttgtaaccctaatcagaagaagcgcanttcaagcgagtgacagccaccagccatgggtcgtatgcacagccgcggtaagggtatatcctcttctgctttgccctacaaaaggacacctcctagctggctcaagatctcttcgcaagatgtcgaagaaaatatctgcaagtttgcgaagaaaggtttgaccccgtctcagattggtgtcattctcagagattctcacggtattgctcaggtcatagcg

SEQ ID NO: 2367 - DNA, 272 bp, Glycine max
  Clone ID: 700556296H1
aatacatctcaatgatatctctgtcaaatgtattgaaggaactggtgttcttttactatggtctgaccagtgggacggcatactaggccatgtcatgtgatttccatgaagagttccctccagctgttccataaatgatgcacatcatttagccattctttatgggattggattctcatatgcatgtagtgaggtttccctcgttcagagcatgaaatgaatctactgaaaaaatgtcatgtgatttctgaagggttcactgttagttgagt

SEQ ID NO: 2368 - DNA, 91 bp, Glycine max
  unsure (1)..(91): unsure at all n locations; Clone ID: 700556303H1
tttctctctcccttgagtcaaagggactcgntagttnttactgcncaggttntacaaacagngcagaganggtgntnatcatccnggnttg

SEQ ID NO: 2369 - DNA, 291 bp, Glycine max
  Clone ID: 700556304H1
tgtgctaagaagaagaaaatggcacttccccttcttcgaatccccgggattccacttgccaagcaacaccaatcattcccttccaatacccgccgcaaagccacgacggcgcaggcggagctcgagacagcggtggcgcggacgggcggaaccggttaccagtctccgtccgtcgatgttcccacgcataaggtcatagtccacgacagacaacgaggaatcgttcacgaattcgtcgtgcctgaggaccagtatatattacatactgctgaggccagaatattacccttc

SEQ ID NO: 2370 - DNA, 187 bp, Glycine max
  Clone ID: 700556305H1
ctcaaaggaaaagtgtggctatttcgtcaagttatctgggaagttggaacaatgtggctgagagttcaacattcagtaacaatgtgttaagcaagccatataaacagggtgagcatgtgcaatcctcattacagtctagcaaggccaagtccttggcagcaagccttcagaagggattacagattat

SEQ ID NO: 2371 - DNA, 288 bp, Glycine max
  Clone ID: 700556306H1
cttccgccatattccacaagaactctccaaggatcctccttcccacgagattctttggtgggaaaaatccaagaggtttgaaatttgaaggcagggaagatggattatttcaatgcaccaggaagaaaccatctctttgttccagggccggttaacattccggaccagatcatccgggccatgaacagaaacaatgaggactaccgttctccagcaattccagctatgacaaaaactttgcttgaggatgtcaagaagattttcaagaccatactggaaccccatttc

SEQ ID NO: 2372 - DNA, 286 bp, Glycine max
  unsure (1)..(286): unsure at all n locations; Clone ID: 700556307H1
atttgttcataactcantantnctcatccatgggctccttgattnttccaggtgaacatgatcanaaactanagcntgtttctcttcccntngtatnanccagtcacctcattcccgtagtagacatagctangctcttngccantcatggtgttgatgtcaccataatcaccaccacagccactgccgcnattttccaagctctatcgatcgcgaccgtgaccgcggccagntattagaacccacgttgtcaagttcccatgtgaacaatgggttnccagaagga

SEQ ID NO: 2373 - DNA, 284 bp, Glycine max
  unsure (1)..(284): unsure at all n locations; Clone ID: 700556308H1
aaaatttcttatggctctggcgggttctatgctgagcctgtgcaaaatttggagtcatattgcatgccatcaagtgagaacatagacaattactcttcctctgataacagcagccaaacaacctacccttcagtccaaactttagaacaatattgcacccttgaatctgcttccacaggcaacagtttcnctaaccaaaattctccacctgctctcagtttctcatctaacaatagtccattgtcaaagctagagtcaaactcatatggtaaggccacagcatt

SEQ ID NO: 2374 - DNA, 281 bp, Glycine max
  Clone ID: 700556310H1
ctctctttctctttctcactctcctctgatatttctatattttggtgctctgtgtctctacgatctggatccaacggtccaaaatgttcggggcttgtgctgcttgttttcccaggttttagagctccaaaccttcagatccacctcattcgtctccagatcttccttccttgataacgttttcgggttcgagaaggcacttgtttgtttgtcgtacgaaatggagactaaaccgagttcggtgatggttacgctcagttacggccgttgacgtgcgccgc

SEQ ID NO: 2375 - DNA, 280 bp, Glycine max
  Clone ID: 700556311H1
cttcgtcaagcaaaggaagctgctgcttattctcgaacttggagaggacacatgcagaatctacttggctatgcttgttcctgtatattgtgtgtataaaatgatcaaggtattgtgatgtcaataatccaataattatttattcttagaaagctaatgattgtaactggtgggttggagctttcttaaggcatagatggtttgcatgaattgcatgatcgatctgtatatctatttactgaataatgctgcttgaactaatcatcgtttgtttgatagc

SEQ ID NO: 2376 - DNA, 275 bp, Glycine max
  unsure (1)..(275): unsure at all n locations; Clone ID: 700556312H1
ttcttctcttgcggctagggttttagcgcanttcttctagatttaaggaagatgggtaaggaaaaggttcacatcagtattgtggtcattggccatgtcgactctgggaaatccactaccactggtcacctgatttacaagcttggaggcattgacaagcgtgttattgagaggtttgagaaggaagctgctgagatgaacaagaggtctttcaagtatgcctgggtgctggacaaacttaaggctgagcgtgaaagaggatcaccatgatatgc

SEQ ID NO: 2377 - DNA, 282 bp, Glycine max
  Clone ID: 700556313H1
ctgccttttcacgccacttgtgactcttccattcccaccagaatcaccttccctatcttttagccactgctaaaacttgtccttttcctttccccccgcaaaaaataaaataaaataaaatccaacacatttaacagatttcacgccaccaacggtgtcttcgtaacggatatagcataaccttttgatcattcggtatgaaaatccaatctccaacctcggatccatcttttacattcttcagatcataggatctaatattgtagcagttttgaaagaaga

SEQ ID NO: 2378 - DNA, 179 bp, Glycine max
  unsure (1)..(179): unsure at all n locations; Clone ID: 700556314H1
tctctcccttctctttctctctgcgacaccagatgatggagacgacggcgaangaaaacgctgtcgttgcgccaatcgcggcgttgttgttggtggtgctactcgcggcgagtgtggtggtggaggctcaggagaactcggacgtgaagacgctggtgaagcacatgcacgggaagaag

SEQ ID NO: 2379 - DNA, 284 bp, Glycine max
  unsure (1)..(284): unsure at all n locations; Clone ID: 700556315H1
aaaaaaaaaccctctctttctctctcttccaaaacctaattttcatttttnctcttcaaacaaattttccaaaatgcgtganatccttcacatccagggtggccaatgcggcaaccagatcggcgccaagttctgggaggtggtttgcgcggagcacgggatcgaccccactggaaggtacggtggggactcagagcttcagctcgagaggatcaatgtctactacaacgaagccagctgcggccggttcgtgccgcgcgcggttcnatggacctcgaaccggg

SEQ ID NO: 2380 - DNA, 278 bp, Glycine max
  unsure (1)..(278): unsure at all n locations; Clone ID: 700556316H1
gttatcttctagtatttttcaagtaacttaaggtttcaaacctaggaagttggaagtcatggcagcaacattgatggcagcaacaagttctggcactcttaaagcaactcctttcctaggccaaggcaagggtgccaatgccaatgctcttagggatgttgtttccatgggaactgggaagtacaccatgggcaatgatttgtggtatggaccagacagagtgaaatactgggaccctttcagctcagacccctcatacttgaaggagantcccaggg

SEQ ID NO: 2381 - DNA, 276 bp, Glycine max
  unsure (1)..(276): unsure at all n locations; Clone ID: 700556319H1
tctttattttcccaaatctccatctgggtcattagtttctgagcctctcttgtttttacaaccttttactccattcctcataccaacagagaaaaagggttggttccttttttattcttgtctccttattttgtttcttctgccactcattgcttgctgagagagccttttgttctgagtttttggtttcttggtgagtgcttctgacaatatattggaacttggttttggggatggtgctttntagggtacccaattgagnttttnttctctaaa

SEQ ID NO: 2382 - DNA, 290 bp, Glycine max
  Clone ID: 700556320H1
taagaattacaacaagctggtgtctcttggcttcaagattatattcttgtcaggaagaacactggacaaacaggccgtaacagaagcaaacttaaagaaggctggctaccacacatgggaaaaattaattctcaaggatccacaagatccttccactccaaatgcagtttcatacaaaacagcagcgagagagaaactgataaggcagggatacaacattgttgggatcattggagaccaatggagcgatctcctcggaggccacagaggcgagcaggacctttaagctt

SEQ ID NO: 2383 - DNA, 51 bp, Glycine max
  unsure (1)..(51): unsure at all n locations; Clone ID: 700556321H1
attattattttctcgcnccgatttgtttgcanttacgacatagtcgcgata

SEQ ID NO: 2384 - DNA, 97 bp, Glycine max
  unsure (1)..(97): unsure at all n locations; Clone ID: 700556322H1
aactatccctctaaaggcccacccaccttctttttctgctctctctactctgctnctgctnctaaaccacccacaacacaacaaccgnatncntttt

SEQ ID NO: 2385 - DNA, 282 bp, Glycine max
  Clone ID: 700556323H1
gccatgggctggcccatggtaaccttctggtgggcccattcgtgaaggccgggcctctgaggaacaccgagatcgccgggcaagcaggctctctcgccgctggtgggcttgtggtgatcctcagcctttgcctcacaatctatgggatttcatcttttaacgaaggagacccatccactgccccgtcactgaccttgacgggccgcaagaaggagcccgatcagctccaaactgctgatgggtgggccaagttcaccggaggcttctcttcggagcatttcg

SEQ ID NO: 2386 - DNA, 284 bp, Glycine max
  unsure (1)..(284): unsure at all n locations; Clone ID: 700556324H1
ctcgagcgagnaaattgctttgctgtaagtttctgattcctttcttcagaattccaagttttcatttcgttagggacaaaagattgtgagatagagtatggctggaaaaggcgagggtcctgctatcggaatcgatttgggaacgacgtactcttgcgtcgnccgtgtggcaacacgatcgtgttgaaatcatagccaacgatcagggtaatagaactaccccatcctacgtggctttcactgatacagaacggttgatcggcgatgcgcgaagaaccaggtcg

SEQ ID NO: 2387 - DNA, 273 bp, Glycine max
  unsure (1)..(273): unsure at all n locations; Clone ID: 700556325H1
tcgcgtggcagcgcgtgctcccttacttcacccgcaactacagcgtcattctctacgacctcgtctgcgccggcagcgtcaaccccgaccacttcgactaccgccgntncaccacnctcgacgcctacgtcgacganctcctcaacatcctcgacgcnctccgcgtcccccgctgngtctacgtcggcnactccatctccgccatgatcggcatgctggcctccatccgccgcangacctcttctccaaantcatcctataggcgctcnccta

SEQ ID NO: 2388 - DNA, 283 bp, Glycine max
  unsure (1)..(283): unsure at all n locations; Clone ID: 700556326H1
aaaaaactcccttgtatatngtngcagctctagctagggtttcgcaagtggcgatccgaagaagaacaacgacgatggcgatggctgcagctctgcntngcgaaggaaggcgtttganccaaccaatcaacgccctccactcttctctcaattcctccctcatctctcaagaccaagnccctcatggcgcgcgctgccatttccantcaagttgtgaggaaccgaatgaagagtgtgaggaatatccagaagatcaccaaggccatgagatggttgccgcgtc

SEQ ID NO: 2389 - DNA, 279 bp, Glycine max
  Clone ID: 700556328H1
agagagcgagcgagcgagcagtttcaaagagaggatttgggattgggaaggcgagggattgcgctgcgtctcttcctcttctctttcgattcatccctcattcataatcttccaatccaacaacctcagcctcacactcacacatacacacatctgaacgcgtatcgtccctcccatggcttcaaagcgcatcctcaaggagctcaaggacttgcagaaagacccaccaacttcttgcagcgctggtccagtagctgaggactgttccattggcaagca

SEQ ID NO: 2390 - DNA, 279 bp, Glycine max
  unsure (1)..(279): unsure at all n locations; Clone ID: 700556329H1
cgaaagattttatccaattgaaattttaaaaatgactgggataaacttaaganttcaattattgaaattgaataagtaaacaatttaattggattggtcgaatggtatcaaaaaaatggagtactaactcccatttcttatttattattgaattaaccgatcaacttgctttgttatcgaacatttctttttgatttcaaaaattttccggaaaaaatttgaatctatttttatatgcgaatcaatcctactacttctggtccgaggtttctgcgctga

SEQ ID NO: 2391 - DNA, 279 bp, Glycine max
  Clone ID: 700556330H1
gaaagttgttgtaaagccttgttgctgccatggccacccacgcggctcttgcttctacaaggatcccttcaaacacaaggttcccatccaaggcctctcactctttcccaacccaatgcgccttaaagagacttgaggtgacagaattctctgggcttagatccacttcatgtgtcacatatgctaacagtgctagagaatcttccttttttgatcttgtagcttcccaactcactcccaagaccaatggatcaactcctgtgaggagagacagtggcc

SEQ ID NO: 2392 - DNA, 279 bp, Glycine max
  Clone ID: 700556331H1
atcactttctgtatatttggaatatgtctctggtggttctatccataaattacttcaggagtatggttcatttaaggagcctgttattcaaaattataccagacagattgtctctggacttgcctatctgcatggaagaaatacagtacacagggatattaaaggggcgaacatactagttgatcctaatggtgaaatcaaactggcagactttggaatggctaaacatataaattctctgcctcaatgcttcatcaaaggaatccatactggatggca

SEQ ID NO: 2393 - DNA, 232 bp, Glycine max
  Clone ID: 700556332H1
gtgtggactcaaggtgtgtcaaggcttctatctattgctgcagagaggaacaacagaaacagaatataaatatataatgaaaaattattgaggagatggtagtaattaagtatgatatgatataattaattaatgaacatggtagtagatcttttgatacatggtggggttggtggggttttaatccaaatgtaaaaatgggtaaattaaattgaagttctctagttatgcc

SEQ ID NO: 2394 - DNA, 283 bp, Glycine max
  Clone ID: 700556335H1
ctgccacaaagtgcgagaagcctatcagcaaacagagtctcttcttgacacacagggaaggcagagagtatcatccatggcggccaccagagcaataactatagccagcaactccacatgctctctgcttgcaaagaaaccctttgtgggtggcactgctctttccctcaacaacctcaatttttgtcgtactaggaggtcttacacctgtagagccatctacaatccccaggttgtcgtcaaagaagaaggccaacccgaaaccccgattatagagttttct

SEQ ID NO: 2395 - DNA, 93 bp, Glycine max
  unsure (1)..(93): unsure at all n locations; Clone ID: 700556336H1
cganaatctatagcanagtgattgattccagtttccaatngncttgggcacnacnncnttgatacggaaggnaggttcttntcttcaccccca

SEQ ID NO: 2396 - DNA, 286 bp, Glycine max
  Clone ID: 700556339H1
gaaagtagcaaagatgacaggtgggatgtttggaaggaaggggcaaaagataaaggggacagtggtgttgatgccaaagaatgtgttggacttcaacgccataacctccgtcggaaaaggcagtgctaaggacaccgccaccgatttcttgggcaaaggcttggacgcattaggtcatgcagttgatgctctcactgccttcgctggccatagcatctccttgcagcttatcagtgctactcagactgatggtagtggaaaaggaaaagtggaaacgaagcctatt

SEQ ID NO: 2397 - DNA, 238 bp, Glycine max
  unsure (1)..(238): unsure at all n locations; Clone ID: 700556340H1
ttcgcgtcagaaaggtttcacaggttcctgtgttagaaaccattgccgaagaggctgaagaatgtgaccaagagtttagtcctcactagctagctattgttggtgaatatattacatatatatcgttgttgttcactttaatttgttgtgtagaatcatnnagtttcacaatcgattgaaagtttttgttgtcgattcgtggtaattaatgaagtttttgtatgttgattgcctagct

SEQ ID NO: 2398 - DNA, 278 bp, Glycine max
  Clone ID: 700556341H1
ggatctcttcaggaaatgtatggagccggtggagaaatgtttgagggatgctaagatggacaaaagaagtgttgatgatgttgtccttgttggtggttctaccagaattcccaaggttcaacaactgctgcaggacttctttaatggaaaagagctttgcaagagcattcatcccgatgaggctgttgcatatggtgcggctgttcaggctggcaatcttaagtggtgagggcaatgagaagttcaggatctctcctccgggagtcacccctcgtctc

SEQ ID NO: 2399 - DNA, 281 bp, Glycine max
  unsure (1)..(281): unsure at all n locations; Clone ID: 700556342H1
ccacatccaagatggcttaccaccatcatgaccacaccaaccggaaatcccttttggacaccctatactgctccgaagcagaggaggactacggtcatttcctaaacaactcctcccctgcntcccctcctttcttgctccaaagcgacatgttttcggacgaacaagagttgacatcgctgctggggaaagaacaccacaaccctctaagcacctgtctccaaaccaaccctgccttggactttgctcgctgggaagccgtggatggatgctcaaagtca

SEQ ID NO: 2400 - DNA, 277 bp, Glycine max
  unsure (1)..(277): unsure at all n locations; Clone ID: 700556343H1
acattcaccattttnntctnttccgttctgttctgttctgctttgcccctctttnctcccaatgactacnccaccattctctntctttccaactcctctgagcctcgctcgttaggttctctgtctcttctcggagacccacaaaacaattncttatttatttccttctcaaacaaagaacctctatttcccctttgctgctcagatctagtatncctcaagtcacaaccntntntngtnccgtnagcggtgtgagacatggtaaagaagaattctt

SEQ ID NO: 2401 - DNA, 92 bp, Glycine max
  unsure (1)..(92): unsure at all n locations; Clone ID: 700556344H1
canatccttcaccatcctgccacttgatcaattatcctgcttntgatgtgggcnagattcaggtttgcagctacctccttccttgaagncac

SEQ ID NO: 2402 - DNA, 280 bp, Glycine max
  Clone ID: 700556345H1
ctccaaccaaccaacttcttaattaataactgtcgtcgtttcaatctcgttacacatctcaaaacgcagcagcagcacactcgacttaaaatgcaagccgtttcactctcacctttgtcgtctagggattcttccgacgagttcgctggaaagttcgaacacgatttcgtggctaagctcaaaatcaacgaaaacgaaaacgaagagaagcataacgaagatgaggtagaagaagaggaagagtttagcttcgttctcagaatccgatggatcgccgatc

SEQ ID NO: 2403 - DNA, 267 bp, Glycine max
  Clone ID: 700556346H1
caccaacataatttgtttttctcttctagcttccactatgtctaaaacgaatgtgagaagacatgctcttgagaagtgcaggagtgtgaaagagacacagaaagtattgaaccacaactttttcaccagaaacctcaagaaagtgtaccctattgggcttcagaaaagcacctcatctttgtctctgtcttcaatttcatgtcttgtccacaaaactcaaatgactcttcacggctgattctttgactccatgatgaaaagattcgc

SEQ ID NO: 2404 - DNA, 180 bp, Glycine max
  Clone ID: 700556347H1
agaagagtgactttatcaaaggaagctagaaatgggttagaatttttgaagcgtaaaaggcttcagcgtgcaaaatttgtcactgccacccagacaagtgttgctaacatgatgagcagaagtggaaatgcttaagagcttcagcatcatgtggcccaagatttcatggtaatgctactg

SEQ ID NO: 2405 - DNA, 282 bp, Glycine max
  unsure (1)..(282): unsure at all n locations; Clone ID: 700556348H1
aaaatggttcagatatcagtttcggtggtttcactctatcgccacccagttccgatggctctcctcgccgtcacttcgcgcgctcccttcctcttctccccaaaccctaaaccactttctccatcctctttctactcnccacctctctctctctcctcgctctcccaggttcccttctctccgcttccgctctgccaccggagacgccagcgaacgccggcaagcccgccggtaagatctccgacgagtggggcgaggactacgatcgaggccgaagcatga

SEQ ID NO: 2406 - DNA, 95 bp, Glycine max
  unsure (1)..(95): unsure at all n locations; Clone ID: 700556349H1
caaggcctcattgttgggagacaccattgcttatgatcaatgagctnccaggctaaagtcaagattcatggaagnccgaaagagagagatttgaa

SEQ ID NO: 2407 - DNA, 288 bp, Glycine max
  Clone ID: 700556351H1
aaaattgataacatcacacagcattagtatgtatcagcaacaagggtcagatccaacaaagcaatcaccggcaaccggttttccggtgagctatagcaattcaacaacgtattcgaccaacgaggcttcctacgctccagtcccacctccccagcccaaacctcttgtcgattggtccaccggcctctgtgactgcttctccgaatgtggaaactgttgcatgacgtgttggtgtccatgtgttacctttggccgagttgcagaaattgttgcaagggatccacatca

SEQ ID NO: 2408 - DNA, 285 bp, Glycine max
  unsure (1)..(285): unsure at all n locations; Clone ID: 700556352H1
cgagatttttttgtacacttgacatgtcttcatattttccaagctttgctacaaaaatcccacgtatgggaaagggatacgatgatgtgttgttcacagtgaccaaccaattagtaaaatcaggttcatggtccaacaactataaagtgccctgcaacctctcaaagcagcacattggttttgtatcgaaattcgaccanatttgnncttctcctgtgatggaggacgagcatnnaangttggattctntgcctganattgaattatcagtcagaggaatattcc

SEQ ID NO: 2409 - DNA, 285 bp, Glycine max
  unsure (1)..(285): unsure at all n locations; Clone ID: 700556353H1
aagaaagaggagcacaaaggagaacaccatggtgagcacaaaggtgaacacaaaggagaacaccatggtgagcacaaaggtgaacacaaaggagaacaacaccatggggagcacaaggagggacttgtggataagatcaaggacaagatccatggtgatggccatgacaagggtgnnnnnnnnnnnnnnnnnnnnnnnnnnnnnnnnnnnnntggacatgaccatcatggtcatagcagcagcagtgacagtgattagatcttatatgttagcagtgtacggtac

SEQ ID NO: 2410 - DNA, 286 bp, Glycine max
  unsure (1)..(286): unsure at all n locations; Clone ID: 700556354H1
gtgagtttagcagagtgcactcacctcacctagggttttgcatcagttttcaaccactatagcagaatggaacaaaatgcgtgcgaggaattgtacgaaaattgcttcggatttcaagtgcgagaagaaggttctcgaaacagttgatgaatcaatcgtatgccccnnnccacagaagaacgaggaacccttaatcgttaaattcagagagggacaaaccaaccttcctgaaaaatactctgcacttgtagatttgtttggtcacacaantgttcactcaggttgc

SEQ ID NO: 2411 - DNA, 238 bp, Glycine max
  Clone ID: 700556355H1
agcatggcttcatgtagcgcacctccctccctgatgctggtccaccctcaagacctctctcgctctcagagaaccacattctctctctatcctctcctttttaagccctccaaatgcctccacatagagcccaaatccaggacttgccatgccctcgtcgccgctttggctgcagaggtccaagtgcctctaactgtccacgacacggaggaggacgacggttctgatggctccaccg

SEQ ID NO: 2412 - DNA, 280 bp, Glycine max
  unsure (1)..(280): unsure at all n locations; Clone ID: 700556356H1
gtttgttgtgagctataagctagtttatcgtgaggagaatatgaagttgtttgttttctttgttgctgcagtagttttggtagcatggccatgccatggcgcaggctaccaaaggttccctctccgaatgaaaactggctatggtgagcgttcttcggaggtaaaatgcgcaagttttaggcttgctgtggaagcacacaacatccgagcctttaaaaccatcctgcnagagtgcgttgaaccaacaaaggactacattaatggcaacatttagatcaga

SEQ ID NO: 2413 - DNA, 276 bp, Glycine max
  Clone ID: 700556357H1
gtacttcagcatatgtgaaatctgaaatgaaatgagaagaacaatgtcaaaggtatcatcagcatgcttcattttctttgcttttgtagttgtagcagcacttcatgttgaatgccgttctcttcggcctagtgtttctgatggagttgatgcaattcaacctcaagagtcttatctacaactcaataaagaccaaagggttgttgttgagtctcttctgatgatgatgagcattctgtaagcaaatgtacgggttctgcatgttccaataacata

SEQ ID NO: 2414 - DNA, 178 bp, Glycine max
  unsure (1)..(178): unsure at all n locations; Clone ID: 700556359H1
caaaacccaaaggaggctccttcggatcataatcaccgaccatgacgccaccgatnctgactcctccgacgaagaacaacagcagcagcaacaaaaaacaagaagagtgaacagagaaatcacccaaatcaacatgcaacttcctctatcacataatagttccttttccccttcatct

SEQ ID NO: 2415 - DNA, 267 bp, Glycine max
  Clone ID: 700556360H1
caaggttcctctcattcttggtatctggggaggcaagggacaaggaaaatctttccaatgtgagcttgtctttgccaagatgggaatcaaccccatcatgatgagtgctggagagttggaaagtggaaatgcaggagagccagcaaaactgatcaggcagagataccgtgaagccgcagacttgatcaagaagggaaagatgtgtgctctcttcatcaacgatcttgatgcaggagctggtcgtcttggtgaaccacccaatacatg

SEQ ID NO: 2416 - DNA, 279 bp, Glycine max
  Clone ID: 700556361H1
aaccattgaaggatttgcaagtggaccagttcatttcccctggcaattcatgggtacaattcaagaaaagatcttcctggaaagaggattttctttccaataagccatatttacccggggatacacctgctgggcttagattattgagggagaaagagctgagaaatctcagaggtgatggcaaaggagttagaaacttatctgacagaatatatgactatgatatatacaatgatttgggaaatccagataaaggaattgacttgccaggccaaatct

SEQ ID NO: 2417 - DNA, 278 bp, Glycine max
  unsure (1)..(278): unsure at all n locations; Clone ID: 700556362H1
ctgtgaagaagctcaaagcgttaaactgcttcttcttcttcaatggcggcagaatcatcttcgcagtagcgctaaacgcccctttatggaagaagacgacgacgaattctccaaaaagccaccagcaaaaagggttaggtttccaaagggaaagaaagtgaagccaggagatgaagtggtggtggacaaagcaaatgttgaggagggtgaagaagttgacttggtgaatgctaaaactgctaccatgctgccaaagagcgggnaaatcagaaggtttc

SEQ ID NO: 2418 - DNA, 283 bp, Glycine max
  unsure (1)..(283): unsure at all n locations; Clone ID: 700556364H1
gtgtgcgaganatggcgatggcaatggcgcttcgcaggcttncatcntnaattgacaagccntctgcgccctnctcttcaatgccggttccctctactacaagtcgtctttgcctgatgaagctgtttacgacaaggagcgacccggagttacatggccgaagcagtngaatgctccacttgaggtcgtggatcctgagattggcngatattattgagcttgagaaagctaggcaatggaaggggctagaattgataccgtcaganaattcactctgtgtcgt

SEQ ID NO: 2419 - DNA, 91 bp, Glycine max
  unsure (1)..(91): unsure at all n locations; Clone ID: 700556365H1
angacattcattcatcnatggctacccttnntgctcccagcaaccactctccccaagaagacgctgaggntctcaganaggcttttgangg

SEQ ID NO: 2420 - DNA, 284 bp, Glycine max
  Clone ID: 700556367H1
gaaaaatggagttgttcttctacgcggtgttcggcggtttgggagcggttgttgcagtgacggagctgagcaagagcaacaaggaccgaatcaacacctcttccgcattcaattccttcaagaacaactacctcatcgtctattccctcatgatggctggagattggctacaaggtccatatgtctactacctttacagtacatatggatatgggaagggagacataggacaactcttcattgctggttttgggtctccagctcttggacaatgtcggatctct

SEQ ID NO: 2421 - DNA, 285 bp, Glycine max
  unsure (1)..(285): unsure at all n locations; Clone ID: 700556368H1
ctcgagcctcgaaacgaggtcgttttgtgttccgccgaangacncggaggttgtagacangctagcagctatggatttggcatccaatctcggtggcaagattgacaaagccgaagttctctctgncgttcagaagtatgagaagtatcatgtttgctatggaggtcaagaggaagagagganagctaattataccgatatggttaataaatactacgatcttgttaccagcttttatgagtttggctggggggaatcttccatttgcaccagatggaaagggga

SEQ ID NO: 2422 - DNA, 281 bp, Glycine max
  unsure (1)..(281): unsure at all n locations; Clone ID: 700556369H1
ctggatttggagagctgaatccactggggtcttaacatctaaatctggttatcaagttattaaagctgacagggatgatgaaggtcagtacctgggcttcaagacactctgggagattaaacttcctcctaaagccctctcctttggttggaggttactatgggatagacttcctacgaaggacaatttgattaagaggcagattcaggtggataataatttatgcccatctgtcatagtcaacctgaaactgcttcccacttatntcacttgtggcaaaa

SEQ ID NO: 2423 - DNA, 92 bp, Glycine max
  unsure (1)..(92): unsure at all n locations; Clone ID: 700556370H1
ggaccgaccacgcntaaatcccaattgccaaattcctcccattagggtttctctactactactctactaccaattcatgtnctcttattctt

SEQ ID NO: 2424 - DNA, 285 bp, Glycine max
  unsure (1)..(285): unsure at all n locations; Clone ID: 700556371H1
accaaatcaaaccaggccagcttcaaaacgctgcgtttcactcccccgtccctcgcgttgcttcgaaaccctaaccctatccacggcattcctccgctcgccgtcgacgccgtcaccgtcgcgccaactgccgcaaaccgaataaaccgaatcgatctgagnnnnnnnnnnnnnnnnnnnncgatctcggaggtgggagcgaaacgaaacgatgccgtctcacgcggatctggaacgacagatcgagcagctgatggagtgcaagcctcgtcggatcggaggtga

SEQ ID NO: 2425 - DNA, 278 bp, Glycine max
  Clone ID: 700556373H1
ctaacgatgataaaatcacaccaacagaagcacaacttcacgtacgattggataatccgaacacgtgtggacgggtactggaacgcgccgttgggtcccgaaaacttcgttccgggaaaatacctggtcccaccgggctcctcgtacggaggactcaacgaccgtttaggaatcggcgacctcagaacctcgacggtggcatgtcgcgtctctctttagttccaaacctcgattccgctggcttcaacaaccttcaatcggagcagcgttcaggccca

SEQ ID NO: 2426 - DNA, 278 bp, Glycine max
  Clone ID: 700556374H1
gttcgtgctttcccgccgccgctatactgccaccgtctccgccagcgatggcagaagatgattcaaagcctctgaactacattctccgaagtcatactcaagaagaggaaaagcaccgaagcatgggcgttaaggaaaaaagaacagttccagcaaaagaaattccaatccatcagaaagcccgaggatttcatccacgagtatcgcaacaaggaagtggaccttataagaatgaagcggaggtgaagaggaaagtgcctgaataatccaacactatg

SEQ ID NO: 2427 - DNA, 274 bp, Glycine max
  unsure (1)..(274): unsure at all n locations; Clone ID: 700556375H1
caactcagtgaaagagaatccgaggcgaagagaagagaaaaattaagatggaggggaaggagcaggatgtgtcgctgggagcgaacaagttcccggagagacagccgattgggacggcggcgcagagccaagacgacggcaaggactaccaggagccggcgccggcgccactggttgacccgacggagtttacgtcatggtccttttacagancagggatagcagagtttgtggccattttctgtttctatacatcatgcttaaccgtcnggga

SEQ ID NO: 2428 - DNA, 275 bp, Glycine max
  unsure (1)..(275): unsure at all n locations; Clone ID: 700556376H1
gttcatttctacacatccctagctctgtcgttccgtcgttgacgatggcgtttcgggtgcgaancctgacctccgctctctctttcttctctctctcttgtccatcgcttccgccaatgtcttcttcgaagagcgtttcgatgacgggtgggaaaatcgatgggttaaatcagattggaaaaaagatgagaacgtggctggggagtggaaccacacctctggtccaatggaatggagacgctaatgacaaaggtattcaaccagtgaggattaca

SEQ ID NO: 2429 - DNA, 274 bp, Glycine max
  Clone ID: 700556377H1
cgacgagttaactctaaagaaaaatatcttgtcgacatatgctgcttgacttattggtgcattgttaaccaactctcatggaagctcgtgatccaccgcagctgccgatgattgtttgactttgatatcgaaattgctgggagatattcaacgtggatacttacttgtagtgcttagtttgagtctctattaatgaccctatcttgcatggcgctttggggttaaagattacgattcttctccccatgtagtcttacctagcagtttaaaattt

SEQ ID NO: 2430 - DNA, 275 bp, Glycine max
  Clone ID: 700556378H1
gtccgtttggtggctggcaacatggctactggacaactttacagtcatctaatacccctcacactacttcttgttgatggtagcagtccaattgatgttaccgattcacagtgggagctgtatattgtgtgtcagaagaaaactgatcagcagggagagatccaatataggttgactggttttactgctgtttatcgattttatcactatcctgatgattcccgattgcgactaagccagatactggtattacctccttacagcacaaggttagg

SEQ ID NO: 2431 - DNA, 279 bp, Glycine max
  Clone ID: 700556379H1
cagaaaaacaagtagttgagaactaagaagaaggaaatggcttcctcaatgatctcctccccagctgttaccaccgtcaaccgtgccggtgccggcatggttgctccattcaccggcctcaaatccatggctggcttccccacgaggaagaccaacaatgacattacctccattgctagcaacggtggaagagtacaatgcatgcaggtgtggccaccaattggcaagaagaagttcgagactctttcctacttgccagacctgatgatgcccattggc

SEQ ID NO: 2432 - DNA, 187 bp, Glycine max
  unsure (1)..(187): unsure at all n locations; Clone ID: 700556381H1
cagggtctgtgacacacacagactcacttcaagttcccagcttttgcnatttnncccactgtntattgagangaactgcagaacatggcacagattttggctccctctacgcaatggcagatgagaatctcaaaatcctctcccaatgcaactccnattacatcaancatgtggagttctttattgt

SEQ ID NO: 2433 - DNA, 284 bp, Glycine max
  Clone ID: 700556382H1
ctgcaacctaccatgcaattcctcacctgaatccgttttctattgccacgttgtggaagcgtaacgaagatgaatggcattgggaaactcaaatcgtcgagttctgaattggaccttcacattgaagattacctaccttctggatccagtgttcaacaagaacggcatggcaagctccgactgtgtgatttgctagacatttctcctagtctatctgaggcagcacgtgccatgtagatgatacatcacaaggtgctcaagtcaaatctccagaaccttggaat

SEQ ID NO: 2434 - DNA, 282 bp, Glycine max
  unsure (1)..(282): unsure at all n locations; Clone ID: 700556383H1
ctcgagcgcttgtttggtgggagcagcttcttaccgtgacgctgctctacgagggcaacgacaacgacaacaaatataatgaggaaaggaaacatggaactcgagacaaacaaggtctatgactacgaggatgcacgcgggaacgacgctgaagtcccagataccgctcatcagattagcaccgattcatggtttcaagtggcttttatcctcactaccggaatcaacagtgcctttgttctnggatatcccgggaccgtgatggttccgggttggntcggg

SEQ ID NO: 2435 - DNA, 283 bp, Glycine max
  unsure (1)..(283): unsure at all n locations; Clone ID: 700556385H1
gtagccctgaaaccttgagggaccctcgaggttttgccgtgaagttttacaccagagagggtaactttgaccttgttggaaacaaccttcccgtcttctttgtacgtgacggcatgaaatttccagatatggttcatgctcttaaacccaatcccaagaaccacatccaagagaattggaggatccttgacttcttctctcactttccagaaagccttcacatgttcacctttttatttgatgatttgggtgttccacaagattacngcatatggatggtttt

SEQ ID NO: 2436 - DNA, 278 bp, Glycine max
  Clone ID: 700556386H1
gaaaatgtgaggttttacaaggaggaagaaaagaatgatcccgagcatgcaaaaaagcttgcctctctggcagatctgtttgtgaatgatgcatttggtactgctcacagggcacatgcatcaacagagggtgttactaaatacctgaagccatctgttgctggttttctttgcaaaaggaacttgattacctgttggggcggtatcaagccccaaaaggccattgctgccatgttggtggttccaaggtctctctaaaattgagtgattgagtcatt

SEQ ID NO: 2437 - DNA, 279 bp, Glycine max
  Clone ID: 700556387H1
tgaaacgaagaagccctaactacgcacgcactcattcttgagaaagctcaatattcattcgtccatggcactctcttctcgtctcttttccaaatccaaattgatctatggctgtcaaatacttctgcaaaaggagcatgctattccagttcgtcactttgctaaagagtctgcccctcctgcccttaagggagatcagatgctgaagaacattttgtggaggtgaagaacaaatttgagactgccataggaatattaaagagggaagatcaccatgac

SEQ ID NO: 2438 - DNA, 275 bp, Glycine max
  unsure (1)..(275): unsure at all n locations; Clone ID: 700556388H1
ctgagatccttaagagaatctctaagatacagaagactacaagtggagccagttatgttatcctgagagataagtgacaatgtagaccccaatgattggttttgacggaaaatgcagcattaagaagaaaataagttcatataccatgtatatttttcacattttgggcccaatctttgagatttatactattaagttaatgcccattaagtttacgactttgcttaaaactcgttgaagatcagttttctctgggaganaattgtacaagagta

SEQ ID NO: 2439 - DNA, 274 bp, Glycine max
  unsure (1)..(274): unsure at all n locations; Clone ID: 700556389H1
attgctatgctatgctaagctaagctggaaagaaaaaaggccctctgagtgagtgagagtgtgtggttaaagaggagaggaagaagagaagaggaggcggtgcgcaccttagcatggattcctctccgtcatcttctctctcctctctcgcttcgtccccacggcaccatcgtcctctctccaattgagaaaggcaccgattcccatctcatctcatctggctgacataaaggcaaccctgcctctctctcttccatcgnttcaatttctaggc

SEQ ID NO: 2440 - DNA, 273 bp, Glycine max
  unsure (1)..(273): unsure at all n locations; Clone ID: 700556390H1
ggcagctgcaacatctggtgctgtgttaaatgggttgggatcttccttcttgagtggaggaaacaggagccaaacccttctggccactgctattggaggcaaannnnnnnnnnnnnnnnnnnnnnnnagtcctagaagactcattgtggtagctgctgctgcaccaaagaagtcatggctccctggtgtcagaggtggtggcaacctcgtcgacccagaatggcttgatggatcgctaccagtgactatggctttgaccataggccttgggaa

SEQ ID NO: 2441 - DNA, 274 bp, Glycine max
  Clone ID: 700556391H1
tagtgcaaaagctcctgatcagaaaaataaaattgttagccaggtgaagcaaccaattacagataaacatgaactggttcaaggtaagtctgttgtcaatgatgcaactgtaggaaaaaaatttgataagcaaacccctggagaagaaactaatttgcctattgggaggagaaatttaattgcttgtccaagaaacaatgaaaggattttaaacatggataaagatgtatctggttctgctaagtgtcatccggtcaatcaccagagaggggat

SEQ ID NO: 2442 - DNA, 274 bp, Glycine max
  unsure (1)..(274): unsure at all n locations; Clone ID: 700556393H1
ttcttcttctcgtttttactttgacggtttctagagagagaaagtttgttatagagagagaaagcgcgctgctgcttctctgctgctgcttcgacagtgagaagagagagagaagcgctcttctccgtaccgtttctagagagagaaactgatggccggagttaatccgaacggcgtcgcngattttccggcggatccaacgcacggcgggacagttcntcagtaacaacntattcggaaactcttcgaagttacgcgagtacgtcctccgatc

SEQ ID NO: 2443 - DNA, 246 bp, Glycine max
  unsure (1)..(246): unsure at all n locations; Clone ID: 700556394H1
gatatgggttcgaagaggtatgcgctattgatgtgcggtgaggattcggagtacttggtgaagatgcacggaggcacctatggggtattcatgaagttgctccaagagcaagaggaaaagtgggacctctacaagctcgtccaaggagagttcccggagcagcatgacttgcctctctacgatggctttgtcatcatggaagctgctatgatgcactgccatgacccatggncctgacctcatgct

SEQ ID NO: 2444 - DNA, 279 bp, Glycine max
  Clone ID: 700556395H1
caaccctgcttcccataaaagtttgtgcaatctttcaagtaaaataaaatccacaaacatacacaccaaaccaaaccaatcctcaattggctgaaaaccttgttctacatgctctcatagttcgtgtgttgaattgtgttgtgaatttggtgtgatgaagtgggaaatggagatcctccctcctgcatcaccttacacgtacaattccaattggctctagatgacaacagggaccaacaacaacaccaaatggacccctgcaggaacaagctgtttgag

SEQ ID NO: 2445 - DNA, 278 bp, Glycine max
  Clone ID: 700556396H1
cggatttctgtttctctgtcttcattttagtttttacggctagaagaatgtccagctcatcggaatatttggtattttccggccaccacccggcgaactctccggcggaaaagtccactttctctcagacttgtagtctattgagccaatacatcaaggaaaagggtaccttcggagaccttaccctcgggatgacttgcactgccgaaacaaacggttcccctgagacatcgtgtcatctgcaacaaccaggagttgtttccacgatcatcacgcaa

SEQ ID NO: 2446 - DNA, 291 bp, Glycine max
  unsure (1)..(291): unsure at all n locations; Clone ID: 700556401H1
ctcaaacgactcctccgcgaaagantattattcaatatttatggttgggttgaatcccgangttgaagcgttgcagacatcacggctattctaagagtgtctcgctccctcattcatgtccgatctgtacgacggaggacgggtagttgcgtaactgcccgttaacccttcgccgcacggtgggcgtggtgcttgccttctgaaggtggtagcccttcagattgtcttcctcgctggtggtggtttcttctagtttcttcactcttttcattattttagctgcatagttta

SEQ ID NO: 2447 - DNA, 305 bp, Glycine max
  Clone ID: 700556402H1
gaaaaacaagtagttgagaactaagaagaaggaaatggcttcctcaatgatctcctccccagctgttaccaccgtacaaccgtgccggtgccggcatggttgctccattcaccggcctcaaatccatgggctggcttccccacgaggaagaccaacaatgacattacctccattgctagcaacggtggaagagtacaatgcatgcaggtgtggccaccattggcaagaagaagttcgagactctttcctattgccagactcgatgatgcccattggcaaaggaatcgaatacttctaaggaaagg

SEQ ID NO: 2448 - DNA, 302 bp, Glycine max
  Clone ID: 700556403H1
gtagaattgtagaagcttcacttcactctcatcaactcagagttgcatagaaatttgtctctatttttgttattttctctcttctttgtggacttttagcaactatattgtttccaatgtccaagatgttgggagtgtttgtgggacttttgttggtggggttggctgcctctgccaagtttgatgaactcttccagcccagttgggctatggaccatttcatccatgaaggagaactcctcaaactcaaacttgataactattctggtgctggattggatctaagagcaaatatagtttgg

SEQ ID NO: 2449 - DNA, 303 bp, Glycine max
  unsure (1)..(303): unsure at all n locations; Clone ID: 700556404H1
ggagactataggatacggctttttatccgaactgaactcttggggaagggaattccacccactgcatcaatggcatctactnctcttcgcttgcccgtcgttgtgttcctcctcttcttctatattttctacttccgtcaaattctccttaaacccgaataaaatttctcttccgttcgccggaaacaaaaaacctctttcggctccaattcgaaggcggttcaatgtcattgctatggctccccctaaacccggtgggaaggccaagaaagtggttggaattataaagctggctcttgaagc

SEQ ID NO: 2450 - DNA, 297 bp, Glycine max
  Clone ID: 700556405H1
gcacaatctgaggctgaaattcttcatgatgctgtaaaagagaagaagggtagctatgaagagaccattagggtcttgactacaaggagcaggacccaacttgttgcaactttcaaccgctacagagagatccatggcacttccatctctaagaaattggtggatgaaggatctgatgagtttcagagggcattgtacactgccattcgtgccatcaatgatcctattaagtactatgaaaaggtggtgcgcatgcaatcaaaaaggttggaaccgatgaggtgcactcatcgcgtg

SEQ ID NO: 2451 - DNA, 300 bp, Glycine max
  unsure (1)..(300): unsure at all n locations; Clone ID: 700556406H1
cttgcaattgaagttgaagtcttgcccttctctcttcaactccaaacacaagacatcatcatccatggctgcctccgtctccactgtcggagctgtcaacagagctcttttgaacctgaatgggtctggacctggggtttcagctcccagttcatccttctttgggagcagcttgaagaaggttattggctcaagggtccccaacacaaagatttcctctggaagcttcaagattgttgctgtagaagagaaganagagattgaagagacccagcagaccgacaaggacagatggaaggg

SEQ ID NO: 2452 - DNA, 197 bp, Glycine max
  unsure (1)..(197): unsure at all n locations; Clone ID: 700556407H1
tgcgacgtcgttttgtgctttgtagtgtgaaanactgttccgagaacaacaagcgccttatccatttctccacttgcgaagtgtacgggaaaacgattggagcctttctccctaaagatagtcctcttcgcaaggnaacctttcttttgaattttattatcgaaccgttttcttttgaagagcgttttagatctgtg

SEQ ID NO: 2453 - DNA, 301 bp, Glycine max
  Clone ID: 700556408H1
gcacaacgaaccactctgaagccgctcacgttatccacaacactgctcaaccctccttaaaccctaaccaattccaaccatggcttcttcttccaccttcactgcaatgtcccgcctgcaagctctcctcctccgccgccatctctccttcccctcccgccgccgctccaacgccgtcgttctgtcgaggcgcagcgcgccgccagggtctccgccatgggccaaggagttgcattcaacaaagacggcaccgcaattaagaagctcagagcggtgtgaaaagctcgcggatctggttggg

SEQ ID NO: 2454 - DNA, 301 bp, Glycine max
  Clone ID: 700556409H1
gtgtgagtgagtgtatcaatcggccacacagaaatgggcagtgcttctctgattccagtttcctggttgccttggcggccactttctcctttcaagggaacggtgaaaaccttggtcgcaaaaccatggctgaagaagattcagcaagcaagacccctcatttccgtggttaacaaggctgcctctctatcttcccccgtgacagcacccagcgtcggcgttcggtttcggctggacaatttggggccgcaaccgggttcgaggaagagggctaagagaaagggtagaggaatatccgcag

SEQ ID NO: 2455 - DNA, 295 bp, Glycine max
  unsure (1)..(295): unsure at all n locations; Clone ID: 700556410H1
gcaacagaaacaaaagtggcagtattaggtggcatcaccgaagtgcagggagctgccaacagcgtgcgagatcaacaatctcgctcgctttgctgtagaggaacaaaacaaaagagagaattcagttctggagtttgtgagggtgattagtgcaaagcagcaagtggttgctggagtgaattactacataacattggaagcaaaagatggtgagattaaaaatgagtataaagcgaggtttgggagagggaatcccaagagttgctagantcagccaacntaggtgcaggaggca

SEQ ID NO: 2456 - DNA, 248 bp, Glycine max
  unsure (1)..(248): unsure at all n locations; Clone ID: 700556411H1
ctctacactcccatttctgcttccatgactgaaccacacaaacgtagcaatcctaaagcttcgacttcaaccttttttcagtaaagagagagctgagtagttctcagtaagaagcagctggaaaaaaaattagaaaaaaattctcactccttctagggttttgttttattttgcattgnattgaaatccccactactccaaaattcaaaatcccaaaccttctctctagaaaaagaaacagttttttt

SEQ ID NO: 2457 - DNA, 295 bp, Glycine max
  Clone ID: 700556412H1
gaggcatcccaatattgtcaggttcaaggaggtaatattgacccctacacatttggctattgtgatggaatacgcttctggaggagagttatttgagcggatatgcaatgcaggacggtttagtgaggatgaggcacgcttcttcttccaacaacttatatcaggggttagctactgtcatgcaatgcaagtatgccatcgtgacttgaagttggagaacacattgctggatggtagtccagctcctcgtttgaagatttgtgattttgggtattcgaagtcctctgtgctacat

SEQ ID NO: 2458 - DNA, 252 bp, Glycine max
  Clone ID: 700556413H1
ctccatatcaaacaaagtatagataaaatatcattgcagcttcattttcatcctccaattaattagcaatggggcacacatcccttttcactccctcttcctctcttaggttcaactcttcttgtttcctccaccccctcttcttcttcacgctccaacagcgtttctttccccgccctctccaggaacataaggaaatcggtagaagatagaaagattaataaaaatctgctgtgaaagcagtgtaggtga

SEQ ID NO: 2459 - DNA, 294 bp, Glycine max
  unsure (1)..(294): unsure at all n locations; Clone ID: 700556414H1
gcattatccctttggattaatatagccatctcaaatctcaatttcgataatccgttagcacttttttccagtggctctggtgctgccattacgttccaccaaccgccactgcnacacaaatacacttcactacagacaaataaaattcacactcttttgtcagacacgtataagtgtatgacattctctactacaactacttggtgtttcccataccgaacactcttcttcaatcaagcgaggtggtctcgattgcaagtgatccacgatacactctacgttcacaaaacttca

SEQ ID NO: 2460 - DNA, 294 bp, Glycine max
  unsure (1)..(294): unsure at all n locations; Clone ID: 700556416H1
ggcgggctcctttaaccactgacatcaaaggagaagttaatttaggcgccactccaaagagtttgcctatgganacatcggtttatcganaagcanttttacattcaaaatctggaactggcagtgcggattaaatcaaggagttacaggtcttccgttgangggttggcctctagcatctggaatgntcnactaagacctaatttgggtgtccaaattccgaagcccatttgacagcccagaatcatttgttttgggcntcacaacagcancaggtcttggcacaggctcagg

SEQ ID NO: 2461 - DNA, 305 bp, Glycine max
  unsure (1)..(305): unsure at all n locations; Clone ID: 700556418H1
gnaacagaaacaaaagtggcagtattaggtggcatcaccgaagtgcagggagctgccaacagcgtcgagatcaacaatnctcgctgcgctttgctgtagaggaacacaacaaaagagngaattcagttctggagtttgtgagggtgattagtgcaaagcagcaagtggttgctggagtgaattactacataacattggaagcaaaagatggtgagattaaaaatgagtatagagcgaaggtttggganagggaatcccaaganttgctagaattcaagccaacattaggtgcnggaggcatcatc

SEQ ID NO: 2462 - DNA, 116 bp, Glycine max
  unsure (1)..(116): unsure at all n locations; Clone ID: 700556419H1
ccatcctcaaaatntccaaactcggcgatcctcctcgttttgttcgcttcagtgctgcaacgtcggctatgtcggactccaccgccaaanccctcgancagcaccgncagnnangg

SEQ ID NO: 2463 - DNA, 297 bp, Glycine max
  Clone ID: 700556420H1
caacaactaacgtgcaagttccaaggcggagaaaacaataatggccaccaacgaggagagggatatggagaacaagaagagtgaggaagaactgaagcatctcgggtttgtgaagattgcggcaatgaaagccttagtgtgtgtgtcgaatctctacggcttcgcaaagcaaaactcgggacttttgagatctgctgttggaaccgtggaagacactgtaaccaccgttctgggtcccgtctaccacaattcaacgctgttcccaaccacatcctccttttgtcgacaacaaggtgg

SEQ ID NO: 2464 - DNA, 297 bp, Glycine max
  Clone ID: 700556421H1
atgagttcatgagggcaggattatatgatggatggctacctcatctatttgttggaaacttgctcaagggacaaactgttggtgtaattggagctggtcgaattggatccgcttatgcaagaatgatggttgaagggttcaagatgaacctaatttactatgatctctaccagtccacacgactagaaaagtttatcacagcctatgctacattcttgaaagcaagtggtgaaacccccgtggacttggaaaagggcagcaaccatggatgaggtcctccaggaggcagatataatt

SEQ ID NO: 2465 - DNA, 297 bp, Glycine max
  unsure (1)..(297): unsure at all n locations; Clone ID: 700556424H1
tnatcttcaaaatggtgggaaatattatgtgttgccagtaatagagtcatcatatggtggaataagagtagccgcaactggaaaagaaagatgccctctcacanttgtacaatctgccgatccgtatgataaggggattgcaacaattatttcaaccccatatcgagttcctgttatccgcgaaggctttccnntgaacattacgttcggtaattttgcagttatactgccttgtgtcccccttcgttctgagtggaccgtcgttaatggccaaccagaaggacccgcagttaaaat

SEQ ID NO: 2466 - DNA, 299 bp, Glycine max
  unsure (1)..(299): unsure at all n locations; Clone ID: 700556425H1
aaaaaaactcccttgtatattgttgcagctctagctagggtttcgcaagtgcgatcgaagaagaacaacgacgatggcgatggctgcagctctgcntcgcgaaggaaggcgtttganccaaccaatcaacgccctccactcttctctcaattcctccctcatctctcaagaccaagnccctcatggcgcgcgctccatttccacttcaagttgtgaggaaccgaatgaagagtgtgaggaatatccagaagatcaccaaggccatgaagatggttgccgcgtccaagctgcgggccgtt

SEQ ID NO: 2467 - DNA, 111 bp, Glycine max
  unsure (1)..(111): unsure at all n locations; Clone ID: 700556427H1
tcntctctcagtagtgcgantntncgattgctcctnctnngcaactatgncctaaccctaaggtncatgcttncgatcatgaccatncgggcggtgaactctgtcnggctg

SEQ ID NO: 2468 - DNA, 283 bp, Glycine max
  Clone ID: 700556428H1
ctggggcaggagactttggtcctccaaattttggctttgaaactggaagacagtgaagctgctgagcaatattgtgctgagataggaagagctgatgcatatatgcagttgcttgaaatgtatttggatccacaagatgataaggatcccatgtttactgctgctgttcgccttctgcataatcatggagaatcattagatccattgcaagttttagagaaactgtctccagatatgccattcaacttggcttctgacactttactaagaatgttcagggcca

SEQ ID NO: 2469 - DNA, 294 bp, Glycine max
  Clone ID: 700556429H1
cagtaggtggatttctgttagaattgtccaataaagacaaagtaacccttttatttcactgacccaaatccatctaatgattcaattgcactgaaaaataaaaatccttgcctttcccaattagcattttattcacctaacccatttcctattttatttccccacttaaaatgatatttttttcttcttccactaacctgttgaactgaagcaagccacgcagggtttacctggcgtgggttggattgaaagttgaaacatatcctacttgagatagtttgtggaatttaatat

SEQ ID NO: 2470 - DNA, 289 bp, Glycine max
  unsure (1)..(289): unsure at all n locations; Clone ID: 700556430H1
cgactcaattggttttctaaataaacttaaaatattgggtgctacaaggtgcaggaagcttaccacatttccacctctcaacttgactctctcttgaaagacttgaactttcatgttgttccagtctgagaattttccagaaatattaggaganatgaaaaacttattgaagcttgaattgtctggccttcttggtgtaaaaggattgccagtttcattcaaaatcttgttggactccaaagtttagacctggatgatgtgaaaatttttgttaccagtaacattattg

SEQ ID NO: 2471 - DNA, 290 bp, Glycine max
  unsure (1)..(290): unsure at all n locations; Clone ID: 700556431H1
cttgtttttcatttttactttttgggcctttgaaagcttaaaaacctaaacgcccaagactcaaaacaaggcagaaccgctcaactgcgccgtgaaactcttcttctcattcacattcagttgcgcgaagaccatcaggtgtgttcagttgctctgttttatgcaactctgtttttttggttccgcctaggtaggtgttcatgtcttgtgttttggactttcggtactaagagtaggcactaagcattactgcagtattttaagttgttttgtntccttttttgtcatta

SEQ ID NO: 2472 - DNA, 296 bp, Glycine max
  unsure (1)..(296): unsure at all n locations; Clone ID: 700556432H1
tagcactcaaaaaacaacaactcatctcatcattattncctttctcactcagcacatncnnnnnngnnnccaccatcaccaataataatggcatcatcctcatcaaccgttgctttgagaaccatctcctctttctctntgaaantgccaccacaacaagatcattactcaacactagtacttcatccancatcaaccctcttacnctttacatcagcaaactcatttnctctccaaaaccctcaaactcaacantcttccccacactctcactttcactacnctcaacaagtctt

SEQ ID NO: 2473 - DNA, 296 bp, Glycine max
  Clone ID: 700556434H1
aacaatttcagggcaaaggtgccgatggaaccagtattacctgctcgatcagtgggtggaggctttatgagcccgagtatgggaaaagctgttgatgacatagagatgggtaggaaaactgtctgggccgacatgggtagtactgctcttgatcctctgaaggtcaattaaatgagcgcgtggcagtaaaggatggggaattcggtgagttgtctccagaaattaggacaacagtggacgaaacgagtgaccgtgccggaatacatcccaggagatccagctggggaagaaaaatg

SEQ ID NO: 2474 - DNA, 284 bp, Glycine max
  unsure (1)..(284): unsure at all n locations; Clone ID: 700556435H1
ctcttctaaacaagtaaattctgtcttcctttttcttctttctttccatacaaaacagaagcncgagttctgctaccacagtattgtaggtagagaacagaaaccaccttgtttcggaattctgttgcaaaattaagaaggaagaaacatactccattaatgggtggtgttagatggggtcgtccagagtcatcttcatccatgaaactcttcttgctcaggtgcctctggtactggttgcagggctgtttctgtattgggtcctaacccctctagttggtttt

SEQ ID NO: 2475 - DNA, 297 bp, Glycine max
  unsure (1)..(297): unsure at all n locations; Clone ID: 700556436H1
gctatctgcttcctcgtagtacttcattgagagagacatggacactgtactaagtactacgctgctacttcatgttggcatgctccatcgtgcatgttcttcgttcactacaagcaagaatgagaaganaatcaaactacaatcttccaccaggaccctctcttctcaccatcattagaaactctaaacaactctataaaaagccacagcagacaatggccaagcttgccaaaacctatggccccataatgcgtttcaccataggccatcaaccaccatagtaatctcctcaataga

SEQ ID NO: 2476 - DNA, 292 bp, Glycine max
  Clone ID: 700556437H1
ctcaactcatcctttctggttctggttcaacacagcacaccatttctaatgctgtaaaatttgtaccatgcagcaaggggctctgcttctgcttttgtgcttggtctctctgttccccctcactcactatgcctgactttcttgccacaaacccacttaccttttcagctgcagaatctccaagattccccttcctcaattcacgcccaactcttacaccaagaacccaactcaacccaaattcccgtgtcctcttttctcccaaaccatccaaaaccagttgcaataacaa

SEQ ID NO: 2477 - DNA, 101 bp, Glycine max
  unsure (1)..(101): unsure at all n locations; Clone ID: 700556438H1
tncgacgtgtcntaactctgaaactctantattctntctcntcngcagnaccttaacaacnacnnacnaagcattaccagttcccaatttcacagaanaca

SEQ ID NO: 2478 - DNA, 292 bp, Glycine max
  unsure (1)..(292): unsure at all n locations; Clone ID: 700556439H1
gggctgtgcaaattgcattgcaaagaattcgaaccntcgtgcttcaaaacaaggaggtcatngttcctancaaganacattncctggcacagtaacttgaggttgagcctcaaaaccagaaggtttgatgatatcatgatgtcacctcactcccctatacctcagtcccctttggttaaagccacaatttgagttgccatatttctctgcaccatctcagaagaagtaactgatatacgatgattatttggttcttgatttgttaacnggcaggtacataagtgctggattt

SEQ ID NO: 2479 - DNA, 225 bp, Glycine max
  unsure (1)..(225): unsure at all n locations; Clone ID: 700556440H1
tttaatttaagantcaaagcagaaaggttcaagagagggactcagacggccctgcctgtcaaattcaaccactgctttgattcttaaattaaataaatattattgttgttgttgcatttgatcattcacactaccctacatacctaatttattaaattctatgctaccaaataaatttgtagttatttgacattgatgactttgaatttatatacataattacct

SEQ ID NO: 2480 - DNA, 286 bp, Glycine max
  unsure (1)..(286): unsure at all n locations; Clone ID: 700556443H1
tgcaaaaacatctaggaataacaactctagcagatttggaaagttgattgaagttcatttcagctccatgggtaaaatatgtggggctaaaattaaaaccttattgttggaaaagtctagagttgttcaactggccaatggtgagagatcatatcacatattttatcaactttgtgctggatcttcttctgatcttnagagagactgaatcttagagcagtctgtgaatataaatatctagttcagagtgactgcacatcaattgatgatgccgatgatgctaaaa

SEQ ID NO: 2481 - DNA, 286 bp, Glycine max
  Clone ID: 700556444H1
tggacccttgcctgttgatgaaggcccatttcctttgaggaatatagatgatcgggggttagctctagagcagacatatgggattgacccagctattgatggaggtggttctggtccatatgtaaacattcaaggaaagagtcaccttggtccagttagctcaaggattacagctggagtacatggtgtcgcccaacctgatattgatcatatttggcgtggagttattgcaaaagggggaactcctgtttgccgtgctagatgtgtaccaattgggaaaggattg

SEQ ID NO: 2482 - DNA, 278 bp, Glycine max
  unsure (1)..(278): unsure at all n locations; Clone ID: 700556445H1
cttcttcatcactcttctcttctctcttctcccctataataatataataatattaccaacacaacacaacactcacaaaaacagcagacaagtagccagaacaagaaatcctttgacacattaatcactttctttaaggaaactaattaacatgggaggaaggggtcacatggggtggttcctcttctgttgttgttcttcttctctccttttntttgttgctcttcttcttctgtgtcacccagaagaaacttgcccatcatagcctttgaggaggc

SEQ ID NO: 2483 - DNA, 229 bp, Glycine max
  Clone ID: 700556446H1
tgaattcgcgattgttctgtgcgagagaaagaagagagagatcgaaaatggcgttggctttcgacgagttcggaaggccgttcataatcctgaaggagcaggagcagaagagcagactccgaggattggacgctcagaaagccaacatctccgccggcaaagccgtggctcgcatcctccgaacctcctcggccccaaaggcatggacaagatgctccagagccccgac

SEQ ID NO: 2484 - DNA, 260 bp, Glycine max
  Clone ID: 700556447H1
catggagaacctctcatactttctcttccttctctttctcttcgcaacccacgcacgtgccgacctccccggtacgtgggagcttctcgtcccggacgccggcatcgcttccatgcacacggcggtgacacgcttcaacacggtggtcctcctcgaccgaaccaacataggcccatcccgaaaactcctcccgaaaggccactgccgctccgacaaaaacgacgccgtcctgaagctcgactgctaacgcccactccgtc

SEQ ID NO: 2485 - DNA, 288 bp, Glycine max
  Clone ID: 700556448H1
atttattccgcgtctataagctttcttgttttgctattgcttgctccgcaatcataatttcatcatcgaatcaaatcaattttgaaggttcattataatggcggaagagataaccaagaacgacgtcggagtaacctccaaaaccaccagaagcagctccaggttctggcctcgttggattcccacttccaccgatcacatcatcgctgccgagaagcgccttctttccgtcgtcaagactggttatgttcaagagcatgttaacatggctctggtcctccggcttcc

SEQ ID NO: 2486 - DNA, 290 bp, Glycine max
  Clone ID: 700556450H1
gttgtgctgcggtgattcactcgtactttgcttaatatggcggttgagaagttgagcattgcaaaagatgtgactgaattaattggcaaaactccattggtatatctcaaccgcatcgtggatggctgtgttgccaaagttgctgcgaactagaaatgatggaaccttgctccagtgtcaaagacaggatagggtatagcatgattgtagatgctgaggagaaaggactcatcacaccgggtgaaagtgtcctcattgagcctactatggaaacactggcataggtttgg

SEQ ID NO: 2487 - DNA, 294 bp, Glycine max
  Clone ID: 700556451H1
ctccggcgagacagtaagtaacaagcttttcaatttctccgtcgtttggcttccaatggcatcaaataaccactcaccacctctcgagatattagttcgaggaccagaagatttctcgctctggaccggacctcccttcgcgaacggtcaaccaagcatcaagctcgagaaagtgaaatgcatcaacgcgaagttcagcgacgacggatccaagctcatggtgacaaaatcgaactcgctgattagcgtctacgattgcagaatcgccgaagagattagggcttttgaagtccc

SEQ ID NO: 2488 - DNA, 291 bp, Glycine max
  Clone ID: 700556452H1
attggagatgatgattttgagcagagttctcaaaagtgtaaatcaggaggggatgaatatgatgaagatgaacctgatgccaaaagatggaaaattgaaggtgaaaatgagggtatgtctgcccctggaagtagaacagtaagagaacctagagttgtagttcagacaaccagtgacattgatatcctagatgatgggtatagatggagaaaatacgggcagaaagtagtgaagggcaatccaaatccaggagttactacaagtgtacacacccaggatgtccagtgagga

SEQ ID NO: 2489 - DNA, 290 bp, Glycine max
  unsure (1)..(290): unsure at all n locations; Clone ID: 700556453H1
ctgatttacaagcttggaggcattgacaagcgtgttattgagaggtntganaaggnanctgctgagatgaacaagaggtctttcaagtatgcctgggtgctggacaaacttaaggctgagcgtgaaanaggnatcancattgatattgctttgtggaagtttgaaacaacaaagtattantggcacagttattgatgcgcctggacatagggatttcattaagaatatgattactgggacatcccaagctgactgtgctgnncttntcatngattcgaccactggtggtt

SEQ ID NO: 2490 - DNA, 288 bp, Glycine max
  unsure (1)..(288): unsure at all n locations; Clone ID: 700556455H1
ctgcaacacactcagcaatgtcctaacaaactcaacaacaancctcattctagaacctacctcctgagtcatcatctatattatcaattatcagtaaaagacnaataaggnncattaatactaggaataggcctancagtagacacagcttattaatactctnttggacctaacaataggacttgggtcataacaattcctaaattagctgaatttgaaatctgcatttagccttatgtgggtacttccttgaaaaatgtnnntttctcattcacatcatatatgant

SEQ ID NO: 2491 - DNA, 290 bp, Glycine max
  unsure (1)..(290): unsure at all n locations; Clone ID: 700556456H1
tgaagaagcagagagtatgtagggtttaagatcgcnttccgaaactctggcgaagtttctccattaattcttcttgtgcgtttctcccacactttagatgtgaagatgaaggagttatctcagacccagagtgttgttgtccatgggattgctggtgctggttcagtgggctttagccactgtcttcacttatcctctcgacagcatcaaagtcctcattcaggttggttccagcaccggtaaagaatggaccctgcccaggctttgacgagactactctctgtgtcggc

SEQ ID NO: 2492 - DNA, 292 bp, Glycine max
  unsure (1)..(292): unsure at all n locations; Clone ID: 700556457H1
cacaactcctaccaacaaggtgctctgctcgttcactcctctctcatacctctggctcctcctccggtgaaagagggtgagaagaggagttagcaagcaatttttgtttcttttgggagttgggacccctcactcacatggacgcatcaacggctttaatgatcctatccgcaatagcggcctatttaatatggttcaccttcgtcactcgctncctaaaaggtccacgtgtctggcccctattcggcagcctccctgggccttnatccaacacgccaaccgcatgcacgat

SEQ ID NO: 2493 - DNA, 289 bp, Glycine max
  Clone ID: 700556459H1
attagttcattctctttgcgcagttccctacctctcctttcaagatgcagatcttcgtcaagaccctcaccggaaagaccatcacccttgaggtggaaagctctgacaccatcgacaacgtcaaggccaagatccaggacaaggaaggaattcccccggatcagcaacgtctcatcttcgccggaaagcagcttcgaggacggccgtaccctcggccgactacaacatccagaaggagtcaacccttcaccttgtccttcgtctccgtggtggcatgcagatcttcgtc

SEQ ID NO: 2494 - DNA, 285 bp, Glycine max
  Clone ID: 700556460H1
gcgtgaggtaggtgaagacctctcggacttggaacgcagaacgaatgattcatcaatttaggagagttttggccgccaaataaacactctcactataaactccaaagtcccaacgctaaaccaaaccaaaactaaaacaatgttgtctgtctgagtttacattgagagtgcccaagttcgaattcgaaagcaaaaacatgtttttggcgagacccattttccgaggaccctccctttgggcgttgcactcttcctatgcatattcctctgcctctgcagctgcta

SEQ ID NO: 2495 - DNA, 285 bp, Glycine max
  Clone ID: 700556461H1
atctttctctctctgtttggtttggcctcttgctgtaagaagccagccacagtactgttgcgctcctgtggaaccatcgatgggctttaacaggttccacatcggttgagctttgtgtcagatatgccaatagtgttatccttattcttgtgatatactagtttgtatgatcatattttctcggattgtctagcaagtttagctcaattggacgttgaacgaattattataaatctattaagattatcttcaatttctacgaaaaaaaaatattttatagaattt

SEQ ID NO: 2496 - DNA, 281 bp, Glycine max
  Clone ID: 700556462H1
ggttatcggataattcatcattgaatgtggtgtccttaagcttgaggaactgtcaatcttgccaacgtttgcctccccttggacttttgccatttctgaaggagctttcaattgaagggcttgatgggattgtgagtattaatgctgattttttcgggagtagctctgttcattacatccttggaatctttgaggttctccaatatgaaggaatgggaagaatgggaatgtaaaggtgtgacaggtgctttccacgtcttcaacgtctttctatagggtat

SEQ ID NO: 2497 - DNA, 201 bp, Glycine max
  Clone ID: 700556463H1
ggcaaccttgcctgtccgatgcggcggtaatgatggcccgagttatgttggggaacggttatgaacccgggatgggtttaggcaaagacaatggcggcataactagcctgataaaaacccaaggaaatcgtgggaagtatggtttaggctataagcccactcaggcgaacatgaaaagaagcatcgcggaaggaaaaaaag

SEQ ID NO: 2498 - DNA, 291 bp, Glycine max
  unsure (1)..(291): unsure at all n locations; Clone ID: 700556466H1
agcactgtctctcactgaaacttgttcgcacattttcacggatctaactaagttatcgccatgaatcgccaccacgatcccaatcccttcgaagaagaagaagtcaatcctttttcgaatggcactactgctcctgcatcaaagtcacgtattccaccattagcatctnancnactgggctttggtcaaaggcatgatgctacagttgatattccttggatactacaaatgactccaagaaaaaaggtcaagagctagcagcttgggaagcagatttaaaacggagagaga

SEQ ID NO: 2499 - DNA, 289 bp, Glycine max
  unsure (1)..(289): unsure at all n locations; Clone ID: 700556467H1
gctcttcctaaaacccagaaccagatctagggtttattttccttttcttttagaatttgaacaagttttgcgtcttcaaaggaaataggatgggagaattgaaggacactgaggcttacgaggaagagctcatcnnnnnnnnnnnnnnnnnnnnnnnnnctcccgattccgctaaacccgttactgaatctggcaagaagggttatgttggcatccatagttcgggatttcgagacttcctgttgaaaccagagcttcttcgagccatgtagattcaggattgagcatc

SEQ ID NO: 2500 - DNA, 285 bp, Glycine max
  unsure (1)..(285): unsure at all n locations; Clone ID: 700556468H1
agggaaggaacttctgacgatatttgggcttgctgctcctgtttttataacattgatgtcaaaggtggctttttacgcactacttatatattttgctacatcaatgggtacacatacaatggctgctcatcaagtcatggtccaaacctatttaatgtgtaccgtatggggtgaacctctctcccaaacctctcaatcatttatgcctgaattgatatatggagtaaatcggagttgtcaaangcccgaatgctctaaggtctctcgtgataatggagctatacc

SEQ ID NO: 2501 - DNA, 286 bp, Glycine max
  Clone ID: 700556469H1
gaaatcaagctctttatttggagaatcgctaagagtggcctccaaatcaacaataaaggtttcaaagacaaagaatacttcactcgtgaccagatgtgaaattggtgacagtctcgaagaattcctcacaaaagcaacaccagataaggggttgatcaggttgttggtgtccatgggagaagcattgagaacaatttccttcaaagtgaagacggcttcatgtggtggaacacaatgtgttaatacttttggggatgagcagcttgcagtggatttgctagctatc

SEQ ID NO: 2502 - DNA, 100 bp, Glycine max
  unsure (1)..(100): unsure at all n locations; Clone ID: 700556470H1
gnagagatccatnccaatgttgcaagtncaactgagtagtgcctgctaatgctctgctctgctctacccanacatgctgctgatcacaacacacaccaaa

SEQ ID NO: 2503 - DNA, 283 bp, Glycine max
  unsure (1)..(283): unsure at all n locations; Clone ID: 700556471H1
ctctgggggtccccanncctggaggcatgttcttcccagtgactcatggaatccatnctgtgaggcttggcaatgaggcctcaatctcccaaaatatcaaggtcaaacccggtcaactgtatgctctaattcttggggcctcaaggacttgtgcacaggatgaagttttgaggatctctgtgcctccacagactggtgatgttccttgcagacccttatagcctcaatggtgatgttatgcttgggggtttaaggccacttctagtgttgtcaaagtgatttc

SEQ ID NO: 2504 - DNA, 278 bp, Glycine max
  unsure (1)..(278): unsure at all n locations; Clone ID: 700556472H1
tctcaattcagttaacacaccaaccccacatccaaagcttccagttcaatatggcaaccttgtcaagttttgctcctttggccattctaagtttagttctagtaattagtgccattgtctttgaggctgaagctaggccaaggacattctttgtatttggagattcacttgttgatnatggaaacaacaattacttgngctaccacggcacgtgccgatgctcccccttatgggattgattaccctccaagtcatagaccaatggtcgtttctccang

SEQ ID NO: 2505 - DNA, 283 bp, Glycine max
  unsure (1)..(283): unsure at all n locations; Clone ID: 700556474H1
gctggcatacgaaactgtggccaggatgggattaatgaaattaaattcctgatcaaagaggcgcacaaacgaggaatagaggtcatcatggatgttgttttcaatcatacagctgaggggaatgagaatggtcccattatttctttcnnaggtgtcgacaacagtatgtattacatgttagcacccaagggggagttctataactattcaggatgtgggaacacgttcaattgcaaccatccagttgtgcgacaatttatagttgactgcttaagatattggg

SEQ ID NO: 2506 - DNA, 282 bp, Glycine max
  Clone ID: 700556475H1
ctgctctagaaaattcagtgctgaaacatggcttcggctactctctctgtagccaaaccagcccttcaggcaaatgggaaaggcttctctgaattctctggcctccgaagctcatcaggcttccttcccttttctagaaaatcttcagaggatttccattctgtcattgccttccagacctatgcagttggaagcagtggaggatacaagaagggtgtgacagaagcaaaactgaaggttgccataaacgggtttggaaggattggaaggaacttcttgagg

SEQ ID NO: 2507 - DNA, 282 bp, Glycine max
  Clone ID: 700556476H1
ataacacaaagcacaaagcaaagctcatccttgagttaaaaaatggcagcagcttcttccatggctctctcatccccatccttggctggcaaggccgtgaagctgggcccatcagccccagaagtgggaagggtgagcatgaggaagaccgtcaccaagcaggtctcctcaggaagcccatggtacggcccagaccgagtcaagtacttgggcccattctctggcgagcccccgtcctaacctaaccggtgagttcccaggcgactaggctgggacatgctg

SEQ ID NO: 2508 - DNA, 282 bp, Glycine max
  unsure (1)..(282): unsure at all n locations; Clone ID: 700556477H1
cccttctccagaacctccgcgtcgtccgatgggaacagaaggttacacttacatggggcgcagtttgaccgaactccgcatcaacgacgattcctcttcctccgccttcagcgactgcaacagtgacagatctggcgaattcgccaccgcttcttcgcagacgcggaggtttctgatcgcctgcgccaccgaaaattccgacgacttgattcgccaactcgtttctgatctccantcctcttccacgactatcagaaacaagccgccatggaaatccggtta

SEQ ID NO: 2509 - DNA, 262 bp, Glycine max
  unsure (1)..(262): unsure at all n locations; Clone ID: 700556478H1
gtgagtttgttgatcgagataacanagaaacagtgtgatgacnaatgaaggtccttgtttacttcgttgctacaattttggtagcatggcaatgccatgcgtacgatatgttccctctccgaatgaacactggctatggtgcccgtactccggaggtgaaatgcgcaagttggaggcttgctgtggaagcacacaacatctttggctttgagaccattcctgaagagtgcgttgaagcaacaaaggaatacatccatggcga

SEQ ID NO: 2510 - DNA, 281 bp, Glycine max
  unsure (1)..(281): unsure at all n locations; Clone ID: 700556479H1
accaaatcggcnacgtcgccttccgctacagatccgcggcggaaccaccgtatctgactatctccgattgatcttccgataaaagtggaccggaaatgccggttgccgcttccgccatttactttctcaacctccgcggcgacgttctcatcaaccgcctctatcgcgacgatgtcgggggaaatatggtggatgcttttaggacgcatgttatgcaaacgaaggagcttggtacttgccctgtgaggcagattggtggatgctcttcttttacatgagga

SEQ ID NO: 2511 - DNA, 283 bp, Glycine max
  Clone ID: 700556480H1
tttggttcttccattgttcagctcagttactctctccaaggttggggcgctattcttgctcatttgtatgctcgcaaggcggatataattctgcgaggatactctggttggaattcaaggcgtgctgtgcaagttctggatgaaattttccctaagaacgccactgagcaaccagatttggtaattgtgtactttggtggtaatgattctcttcttccacatccaagtggtcttggtcaacatgtacctctccaagaatacattgaaaatatgagaaagattg

SEQ ID NO: 2512 - DNA, 206 bp, Glycine max
  unsure (1)..(206): unsure at all n locations; Clone ID: 700556481H1
ganaaacaagtagttganaactaagaagaaggaaatggcttcctncaatgatntcctccccagctgttaccaccgtaaaccgtgccggtgccggcatggttgctccattnaccggcctcaaatccatggctggcttccccacgaggaagaccaacaatgacttacctccattgctagcaacggtggaagagtacaatgcatgcagg

SEQ ID NO: 2513 - DNA, 126 bp, Glycine max
  unsure (1)..(126): unsure at all n locations; Clone ID: 700556483H1
ggaacagagagcgataaccanaggaagggtaataacccaccccatatctcctnttctcttcttcttcggaacnctaaatntctctctttccgatgacgaccatgatgctttcgccttagtttcgnt

SEQ ID NO: 2514 - DNA, 281 bp, Glycine max
  unsure (1)..(281): unsure at all n locations; Clone ID: 700556484H1
tgcttcaccttctgctctagaaaattcagtgctgaaacatggcttcggctactctctctgtagccaaaccagcccttcaggcaaatgggaaaggcttctctgaattctctggcctccgaagctcatcaggcttccttcccttttctagaaaatcttcagaggntttccattctgtcattgccttccagacctatgcagttggaagcagtggaggatacangaagggtgtgacagaagcaaaactgaaggntgccataaagggtttggaaggatggaaggaa

SEQ ID NO: 2515 - DNA, 185 bp, Glycine max
  unsure (1)..(185): unsure at all n locations; Clone ID: 700556485H1
agtgagtgaagaagcattatttccacttgacttgggtgtctccgcctttctcttctcaaatcaaatcaatgagcatggcttctctccccaattcccccgctctttcattctcctcatntctgtccaccaccgncaatctccttcccatgtggccgcttcancgcattnccccgccgtcgngnntc

SEQ ID NO: 2516 - DNA, 284 bp, Glycine max
  unsure (1)..(284): unsure at all n locations; Clone ID: 700556486H1
gttcaacgggcatcgctactcttattcctaaaagcgcgcgtnagatccgacgacgatctttaccgcgccgttgatatctatctcaaggcgctaccncanttggatgagatagagagagagaaggtgtgcagcgtgatggatccgttgaagctttcatacgaggcgcgtgtgcacgcgtcgcagaacaagcgattgccggtgcagattgtgctgcacgcgnttactacgaccagcttacggctgaggagcggggcggaggaggtgaagtggcgacggagaagatc

SEQ ID NO: 2517 - DNA, 274 bp, Glycine max
  unsure (1)..(274): unsure at all n locations; Clone ID: 700556487H1
ccctttcattttccctcactttctcgctcgccaaacgcccctctctctcctccaanngccgaccagctcaccgacgaccagatcgccgagttcaaggaggccttcagcctcttcgacaaggacggcgatggttgtattactactaaggaacttgggactgtgatgcggtcactagggcaaaacccaactgaggcagaactgcaggatatgattaatgaggttgatgctgatggcaatggaaccatcgacttcccagagttcctcaacctgatgg

SEQ ID NO: 2518 - DNA, 286 bp, Glycine max
  unsure (1)..(286): unsure at all n locations; Clone ID: 700556488H1
acctcttttacctttccttccttccacttccaattttcaataattcacgactccttccgagatctctctctgctgcgcccacaatccaaccatggcgaatacggggaatttagacgcggcgatagagcaattgctgaacgtggagaagcagatgaggctcgccggtgacgtggcgggtaccagaaaagcagccaccgatattttgcagctctgcttcgatggcacgagcctggaaaacactcaatgaccagattgtcgttttgtcaanacgacgtggccagctcaa

SEQ ID NO: 2519 - DNA, 280 bp, Glycine max
  unsure (1)..(280): unsure at all n locations; Clone ID: 700556490H1
gtgatagtaaatacaagaataataatatcatacaacttctgaaacaagatgaaaggcaattatcatttatcaacanaatactatctcaaaactaagctctataccagtactcatgtacaacgtcatcctactccattacaaagctatatagtctttctcatcccttgaattacacttatgcttcgatcaattcccgaatagggattctatctatcttaattgaagaaatatcagtgaattctgacaatatagctctgaattcatctccaccagggtctcc

SEQ ID NO: 2520 - DNA, 278 bp, Glycine max
  Clone ID: 700556491H1
actggatcctatggatactgatagctcagtaccaggtccatcttttgactttgatcaactaaatagggcactgaaagataggagacactcagacagggataaaattgaggtagagtttaagcaaaaaattgatgccttgatatctgagattgaaagaacagcaccaaatttgaaggcattggaccaatatgaagctctgctagaaaaagaaagagctgtaactgaagagtttgaagctgtcaggaaagaggagagggaaaaaacacagagattcatga

SEQ ID NO: 2521 - DNA, 275 bp, Glycine max
  unsure (1)..(275): unsure at all n locations; Clone ID: 700556492H1
acttaaatgagactgtgtaaggcaccaccccacaccacaacttcagcgcatccacgtcatcancctcaaccttcaacctctccgagcgagaaccagacacaagaaagaaaacgtgttgcgtcagtgttacccctttctccttctctttatctttctgaatttggcgcgtttcgattctcttcttccgaatcagagagagtctggatttcttgttgaagatgcgagctcttctgcatccaaaaagacgggtcaatccattccacccncatcgcgcc

SEQ ID NO: 2522 - DNA, 265 bp, Glycine max
  unsure (1)..(265): unsure at all n locations; Clone ID: 700556493H1
cttcactgttctctctctgagcaaaaccgaggatccctcatagtattggtcaaatattggctaatgtgnatggggcattcatgctatgtacaagcgcactccttcgagagataattcaaacatggaggacgtggaagaaaactcagatcttttagacatcggcctggacaagggaactcaaatcctcattgatgctttctttaccgcatgtattgtggcgaccatttcttcatccttttggataccatcttggagttgttaagaa

SEQ ID NO: 2523 - DNA, 280 bp, Glycine max
  Clone ID: 700556494H1
atatacaaataacatatatggcttcttccttctctccaagcctatcatcacttgtgcctctgcttgtgagccttttcattgtggtttgtgctgccggtaacttcaaccaagactttcagattacgtggggagatggtcgtgcaaaaatactcaacaacgccaatcttctcactctctcccttgacaaggcctctggctctggcttccaatccaagaacgaatacttatttgggcaagattgacatgcagctcaagctcgttcctggaaactctgctggca

SEQ ID NO: 2524 - DNA, 277 bp, Glycine max
  Clone ID: 700556495H1
aggaacgcgaacacagattcattcacctaccgttcctacccttctctctctcgccgcctcttcttcttcctctcgcatgctccttctctgaaccaaaccaatccattattcatttgaatcttcttatacatcccaaaaaaacccaataaaaaaggggtctttagaaggttctggttgatgggtaggagaggaatcaagctattcgatgaagaaaggaacggtcttttttcaatttccaattttgggtctcaaggggtggtgttagaggtgaggtgtt

SEQ ID NO: 2525 - DNA, 271 bp, Glycine max
  Clone ID: 700556496H1
aagaaagttgcacttgttgtggtcaccggcgaccgtggtctctgcggcggtttcaacaacgcaatcataaagaaagctgaggctagaatcagggaattgaaggagcttggcttggaattcactgtcataagtgttggcaagaagggtaactcttatttcatcagaaggccttatattccggttgacaggtttctagaaggtggcacacttccaactgctaaggaagctcaggccattgctgatgatgttttctcactctttgtgagtgaag

SEQ ID NO: 2526 - DNA, 211 bp, Glycine max
  Clone ID: 700556501H1
gattctgttcaagacagtgttgttgttcaaagggagagtgagaagaaggatgtggaagacactgccacggtaaaagtttcttctaagaggagtacttcaagggctcagctagagaagagtggtgctgaggatgaggattctgatgagcgtgttgatttgaaaactgttgtggagaaggagaagaagattgaaatgccacgtgcggaggaag

SEQ ID NO: 2527 - DNA, 159 bp, Glycine max
  Clone ID: 700556502H1
ctgctttctagtactactttctgctgttggtgtaaaggcttgcatgtaggccacatggcaaacaatgtgacaatcatatgagatcaatttcacatgggcttgtttgttgtggagattttattttggataaataaaaaataaaggagaattgagggaaaa

SEQ ID NO: 2528 - DNA, 294 bp, Glycine max
  Clone ID: 700556503H1
gggagacagtggcagcagtagcacaagctcgtttctctctcggacccaaacctacgctcttcttaagcaacaattgcaagtagctgctaaatccgaggattacaaggaagccgctagaattcgagactcgttgaagctatttgaggacgaggaacctgttttgcgtctgaggagactattgaaggaagcagttgctgaagagagatttcaggatgctgctagttatcgtgatgagctaaacaaaattgctccacactctctttaaaatgttgcagtgatgctacaacatgggaa

SEQ ID NO: 2529 - DNA, 292 bp, Glycine max
  Clone ID: 700556504H1
tggcgatggcaatggcgcttcgcaggctttcatcttcaattgacaagcctctgcgccctctcttcaatgccggttccctctactacaagtcgtctttgcctgatgaagctgtttacgacaaggagcgacccggagttacatggccgaagcagttgaatgctccacttgaggtcgtggatccagagattgctgatattattgagcttgagaaagctaggcaatggaaggggctagaattgataccgtcagagaatttcacctctgtgtctgtgatgcaagcggttggatcggt

SEQ ID NO: 2530 - DNA, 288 bp, Glycine max
  unsure (1)..(288): unsure at all n locations; Clone ID: 700556505H1
caacgacaagggcaggctttctaaggaggagattgagaagatggtgcaggaagctgagaaatacaagtctgaggacgaggagcataagaagaaagtggaggccaaaaatgcattggaaaattatgcctataacatgaggaacacaatcaaggatgacaagattgcttccaaactgtcttctgatgataagaagaaaattgaagatgcgattgagcaggctatccatggctagatggaaaccaacttgctgaggctgacganttgaggataagatgaaggagttggaga

SEQ ID NO: 2531 - DNA, 287 bp, Glycine max
  Clone ID: 700556506H1
attggaattgcctgtagaagtgatgacgataaaatggcagaatacattgattcacttaatcatgaagaaacaaggctagcagttgtctgtgaaagggcctttcttcagactttggatgggtcttgccgcactcctattgcagggtatgcttgtagaaacgaggatggcaattgtttgtttagaggattagttgcttcccctgatggaaccagagtgctagagacatccagggttggtccatatgctgttgaagatatgattgagatgggtaaggatgctggcaagga

SEQ ID NO: 2532 - DNA, 287 bp, Glycine max
  unsure (1)..(287): unsure at all n locations; Clone ID: 700556507H1
gaagttgaagtcttgcccttctctcttcaactccaaacacaagacatcatcatccatggctgcctccgtctccactgtacggagctgtcaanagagctcttttgaacctgaatgggtctggacctggggtttcagctcccagttcatccttctttgggagcagcttgaagaaggttattngctcaagggtccccaacacaaagatttcctctggaagcttcaagattgnngctgnagaagagnaganagagatgnagagacccagcagaccgacaaggacagatgga

SEQ ID NO: 2533 - DNA, 277 bp, Glycine max
  unsure (1)..(277): unsure at all n locations; Clone ID: 700556508H1
tttcgatccgaacatcgtcgctcacttgatctcctcctccgtgcggcaggcgctggagcagcctctcaattacgcgagaaattacctcgttgaccttctggagagttgcgtggagagggtgatttacntggactccgatctggtggtagtggatgacgtggcgaaactgtggagcgccggtctggactcgcgtgccatcggcgcgccggagtactgccacgcgaacttcaccaagtatttcacggcggggttctggtctgagtcgagttgtcgggga

SEQ ID NO: 2534 - DNA, 285 bp, Glycine max
  Clone ID: 700556509H1
cttatccttattgagagaaaaaatgggccaaatcaatcaaattctttgagttgaacacaggggccaagattccttctcttgggttagggacttggcaagctgaacctggtgttgtagctgaagctctcaccacagccattcaggttggatacaggcatattgactgtgctagtgcgtataagaatcaagcagagattggttctgctcttaagaagctttttgatgatggtgtggtgaagcgtgaggacttatggatcacttccaaactctggtgttcagatcatg

SEQ ID NO: 2535 - DNA, 285 bp, Glycine max
  Clone ID: 700556513H1
attggaattgcctgtagaagtgatgacgataaaatggcagaatacattgattcacttaatccatgaagaaacaaggctagcagttgtctgtgaaagggcctttcttcagactttggatgggtcttgccgcactcctattgcagggtatgcttgtagaaacgaggatggcaattgtttgtttagaggattagttgcttcccctgatggaaccagagtgctagagacatccagggttggtccatatgctgttgaagatatgattgagatgggtaaggatgctggcaa

SEQ ID NO: 2536 - DNA, 288 bp, Glycine max
  Clone ID: 700556515H1
attttcctttgtaatggaaagttagaaaccctcatcgtcaaagcacgcgttttttttaatctctctctctcaacaaatatttgtgggtagattcaattcaccatgtcgagctcatcggagtactctgaattttccggccagaaaccggcgaggtcgccggagaaatcgagcttctctcagacttgcagtctgttgagtcaatacatcaaggagaagggtagcttcggagatcttaccctcggaatgacatcatgtgggtcacctgagacatctgtcaatctgctacaa

SEQ ID NO: 2537 - DNA, 158 bp, Glycine max
  unsure (1)..(158): unsure at all n locations; Clone ID: 700556516H1
ttcacaacctctgtnttntctctccacactctgcctctaanttgaaaaaaaaactcaaacactctgttctcgtcgcatgcacataaacaataacaaatggcttccacaactatgttgttgntggtcgtgttcatgattctatgtatatcacacccctc

SEQ ID NO: 2538 - DNA, 296 bp, Glycine max
  unsure (1)..(296): unsure at all n locations; Clone ID: 700556517H1
cttcttctcttgcggctagggttttagcgcanttcttctagatttaaggaagatgggtaaggaaaaggttcacatcagtattgtggttattggccatgttgactctgggaagtccactaccactggccacctgatctacaagcttggaggcattgacaagcgtgttattgagagatttgagaaggaagctgctgagatgaacaagaggtctttcaagtatgcctgggtgcttgataagcttaaggctgagcgtgaaagaggaatcacaatgatattgcttgtggaagtttgaaacc

SEQ ID NO: 2539 - DNA, 295 bp, Glycine max
  unsure (1)..(295): unsure at all n locations; Clone ID: 700556518H1
attttttgtagctgattgtatgggctccaacaagagaaaaagcaattgaacgcatgaaaagggcacttgatgacactattatcacaggagttcctactacaattgattatcataaacttatccttgacatagaggatttcagaaatggaaaggttgatactgcttttattccaaaacacgaggaagagttggcaatggtaagaacccaatataaccttgaaaatattaatgtccctaacaatggatttaaaaattactttcgttgttgaagctgaccantttggtaggaaaactc

SEQ ID NO: 2540 - DNA, 289 bp, Glycine max
  Clone ID: 700556519H1
gtgagctataagctagtttatcgtgaggagaatatgaagttgtttgttttctttgttgctgcagtagttttggtagcatggccatgccatggcgcaggctaccaaaggttccctctccgaatgaaaactggctatggtgagcgttcttcggaggtaaaatgcgcaagttttaggcttgctgtggaagcacacaacatccgagcctttaaaaccattcctgaagagtgcgttgaaccaacaaaggactacattaatggcgaacatttagatcagatctaaaacagttaac

SEQ ID NO: 2541 - DNA, 237 bp, Glycine max
  unsure (1)..(237): unsure at all n locations; Clone ID: 700556520H1
ctcgctccgatttgtttcaattacgacatagtcgcgataattgcctctttttttttttttgngttatcaggannccctctgaatcnggggattaagagaggattntgcancagagggtaaagttgtcagcaacaacnggcccncatgcagcaanctttgcttcancagnngcagatgaaccacccnggnatgctcgccgctgctatgcctcanatggagcctgttccaatggaaatg

SEQ ID NO: 2542 - DNA, 289 bp, Glycine max
  unsure (1)..(289): unsure at all n locations; Clone ID: 700556521H1
cntgaagaaggaganatggggngaaattaaaanggnngnaggcatatnaccggtnncaatcgcgtttccgaattcagaatcactacgtttctcgnttctcctttcgttcgangcatgaatgcaggggcttnaccgcttcagacttcagtancagagtgacagancattagnaactcaaaaaagtangcgncacgatgtnagnaaccatggancgtgaaaacnacnacagcgccaaaagcgtgtcaacggtcngcgacgcgtgggctnctntacgacgnnnngagtgcaa

SEQ ID NO: 2543 - DNA, 283 bp, Glycine max
  Clone ID: 700556522H1
gccatgggctggcccatggctaccttctggtgggcccattcgtgaaggccgggcctctgaggaacaccgagatcgacgggcaagcaggctctctcgccgctggtgggcttgtggtgatcctcagcctttgcctcacaatctatgggatttcatcttttaacgaaggagacccatccactgccccgtcactgaccttgacgggccgcaagaaggagcccgatcagctccaaactgctgatgggtgggccaagttcaccggaggcttcttcttcggaggcattcg

SEQ ID NO: 2544 - DNA, 284 bp, Glycine max
  unsure (1)..(284): unsure at all n locations; Clone ID: 700556523H1
ccttttctctctgaatactctctactcaatacattgcgctctagtctcgtttcaaatattaattttaggttcttcgttacgcgttgtgttgcnttgtgcgtgagaaagtgcgcgtggtgaaaaagcatggctcctcagctcctgagacgaaccttcggaagtcgtttccttgcaaaccctagggccttctctccgctgcttccactccgcatccgcgccactctcttccccggcgacggcatcgggccccgagatcgccgattcgtcaaacagatattccaagc

SEQ ID NO: 2545 - DNA, 284 bp, Glycine max
  unsure (1)..(284): unsure at all n locations; Clone ID: 700556524H1
gnctgccaagaatctggcagctgtcaacccagaaaggaccatctttgatgtcaagagacttattggaagaaagttcgaagataaggaagttcaaagagatatgaagcttgttccttataagattgtcaacaaggatggaaaaccttacatacaagtgaaaattaaggatggtgagaccaaggtgttnagccctgaggaaatcagtgccatgattctgactaagatgaaggaaactgcggaagcattccttggaaaganattaatgatgccgtggtcantgtccc

SEQ ID NO: 2546 - DNA, 279 bp, Glycine max
  unsure (1)..(279): unsure at all n locations; Clone ID: 700556526H1
gagaatgncttggtccactgccctgcttgtatttcataacttccatatctgctgtttaattttgttattcaaatcaccactagaatcatacatatttcacaccttgtctctctctctaccatccaacccttccacccaatatttttggaccatcttaattgttaccaatctagttanggggttaaagactctctgtttttaaaaaaannaanattgnaaaaanaaaaangggggnccgcgntnnntgattccnggaccggngttnaatngggncngntc

SEQ ID NO: 2547 - DNA, 280 bp, Glycine max
  Clone ID: 700556527H1
gtttgttgttgtaactcgttcttcttcttttgttgttctgtgtttgtgtttgttttttctctcacctgaaaatgtcttgctgcggtggtaactgtggttgcggaagctcctgcaagtgcggcaacggctgcggaggctgcaagatgtacccagacttgagctacactgagtcaaccaccaccgagaccttggtcatgggagtggcacctgttaaggctcaatttgagggtgctgaaatgggtgtgcccgctgagaacgatggctgcaaatgtggaccaaa

SEQ ID NO: 2548 - DNA, 283 bp, Glycine max
  Clone ID: 700556528H1
ccaaaatcagcctctaatatttttctcactgtctctccagagaacttgatagagagatggcagctgcaacatctggtgctgtgttaaatgggttgggatcttccttcttgagtggaggaaacaggagccaaacccttctggcctctgctattggaggcaaagttggtgctgctgttactgttaatcccagaagactcattgtggtagctgctgctgcaccaaagaagtcatggctccctggtgttagaggtggtggcaatctcgtcgacccagaaggcttgat

SEQ ID NO: 2549 - DNA, 286 bp, Glycine max
  unsure (1)..(286): unsure at all n locations; Clone ID: 700556529H1
gntgacgtggtgcattgaggaggcttccgcaaagagcaacgccgccgtccaccatcgagggagcttcgtncaccgtccactgtcgaggtaagngctgtgaccatgtcgnttccaccattgttgtcggcgatagggtagattgttgatctgaaagtggagatgtgagtgttacggatcaacttgattcgtaaactgctncgaagaaagtttacggatcaagttgatccgtaagcatcttccagatcaacttgatccgtatgatacttacggancaacttgatccgtg

SEQ ID NO: 2550 - DNA, 284 bp, Glycine max
  unsure (1)..(284): unsure at all n locations; Clone ID: 700556530H1
ggcactgttgctgcccataattcctgcaatagggtgggttctgttcaacattctgcagccggcgctgaaccaactgaaccgcatgcgcanaaccaaaggcgtgatcattgggttggggcttggcggcttggctggcttggtggctgcgccgcatgcatcggcggcggcggcttctgaagtggcggcgatggctgaagctgcctcgaacgacaacaggggacagcttctgctgtttgtggttacgccggctattgcttgggttcttacaacatcttgcagcctgc

SEQ ID NO: 2551 - DNA, 284 bp, Glycine max
  unsure (1)..(284): unsure at all n locations; Clone ID: 700556531H1
ggatgatagagttgtgcttgataggaaggctttatttaagaacactttgagganagcagcttatgcatggaaaaggatattgagctccgtctcagtgaggaagctgctatgctcagatcctttgtggaccaacctgcttttacggatctacattggggatgtttgttcctgctatcaaaggacnaggaactgaggaacagcagnngaagtggntgcctttggctcataagatgcaaataattggttgttnagcccanactgaacttggccaggatctaatgttc

SEQ ID NO: 2552 - DNA, 158 bp, Glycine max
  unsure (1)..(158): unsure at all n locations; Clone ID: 700556532H1
gtganaaagaaggaaattgttcgttcagacggtgtctgaggagagattttcanagtttaacattatctgcagcccctaataaattttggcgtgactgaaattcatgancaacaanaatnaaacaccanncacactannccaacnncnnaanaagctcc

SEQ ID NO: 2553 - DNA, 296 bp, Glycine max
  unsure (1)..(296): unsure at all n locations; Clone ID: 700556533H1
gatcgagataactagaaacagtgtgatgaaaatgaaggtccttgtnttcttcgttgctacnantttggtagcatggcaatgccatgngnaacgatatgttnccttctccgaatgaaccactggctatggtgcncgtactcnggaggtgaaaatgcgcaattgggggcttgctgtggaagcanacaacatctttggcttngagaccattcttgangatgcgttgaagcaacaaaggantacntccatggcgaacatatagatcagactcnaaaacagttatccacaagttattttnt

SEQ ID NO: 2554 - DNA, 292 bp, Glycine max
  Clone ID: 700556534H1
gtttgttgttgtaactcgttcttcttcttttgttgttctgtgtttgtgtttgttttttctctcacctgaaaatgtcttgctgcggtggtaactgtggttgcggaagctcctgcaagtgcggcaacggctgcggaggctgcaagatgtacccagacttgagctacactgagtcaaccaccaccgagaccttggtcatgggagtggcacctgttaaggctcaatttgagggtgctgaaatgggtgtgcccgctgagaacgatggctgcaaatgtggaccaaatgctcctgcaac

SEQ ID NO: 2555 - DNA, 291 bp, Glycine max
  unsure (1)..(291): unsure at all n locations; Clone ID: 700556535H1
ggaagctgctgatgtagatggaaatggctcaattgactacatagaattcatcactgctacaatgcatagacacaaattagaaagagatgaccaacttttcaaggccttccaatattttgataaagacaacagtgggtttattacaagagatgaactagaaacagccatgaaagaatatggtatgggtgatgatgccacaatcaaggaaatcatatctgaagttgatacaattatatctgaagtggacacagatcatgatggtagaatcaactatgaagantctctgcgatg

SEQ ID NO: 2556 - DNA, 151 bp, Glycine max
  unsure (1)..(151): unsure at all n locations; Clone ID: 700556536H1
caaatcttcaccatctccacttgatcaattatcctcttttgatgtggcaagatcaggtttgcagctcctccttccttgaagcacaaaatcatctcttgtaacatccaaaattatcacaaaaaanannaaaaangggcggcngggtctaaaa

SEQ ID NO: 2557 - DNA, 283 bp, Glycine max
  unsure (1)..(283): unsure at all n locations; Clone ID: 700556537H1
atcacttactggaagccttgttgtgagtaagagaaaaggcttcctgcaccgagcacaccaacttgatacctctgattctttctttgcttagaattccacagaatatggagacngttcttttcaatcactccccacctttggaattcaagggtttgagcaaggaggaggaagactcattgctagggcaagtggaaatatggaggtacatgacatgcttcacggactccgtggccttgaaagctgtcatagagcttcgtatagcggacatatagaccgntatggt

SEQ ID NO: 2558 - DNA, 273 bp, Glycine max
  unsure (1)..(273): unsure at all n locations; Clone ID: 700556538H1
gcaccacattcacctgagctttttgtgaggattccaaagcatggcttcccttancagcatccactgctgctgcttcccttggcatgtcagaaatgcttggaaaccccatcaacctcagtggtgccacaaggccagctccatctgcctctagccctgcctccttcaagactgtggctcttttctccaaaaagaaggctgcacctccaaaaaaagctgcagctgctgctcctgccaatgatgagntgccaagtggtaggtcctgacagaagatct

SEQ ID NO: 2559 - DNA, 282 bp, Glycine max
  Clone ID: 700556539H1
gctggtggagatgggtttagtggcaccttactctgctggaacatgtcttccttcccttcaacgccttccaaccctgcaagcccaaaaatggaacaacttctcagcacctcttagttgccaccgccaagtgaaatgtgctgtccaagtccaaccacaagtagcaccacgaattacacctgatgagagcctgcaggtgaagagaagaactctcataggccttctagcattgatgctgtccttgcttattcttcattgcaagcagcaccagcagctgaaaatccg

SEQ ID NO: 2560 - DNA, 281 bp, Glycine max
  Clone ID: 700556541H1
caaagaaaaaaaaaaacccttagccaacacaaccatcatggccacctctgctattcagcaatcagcattcactggtcaaactgctctgaagcagctcaatgagttcgtccgcaagaccggtggcgccggcaaaggtcgcactaacatgcgccgcaccgtcaagagtgctcctcagagcatttggtatggccctgaccgtcccaagtacttgggtccattctcggagcagattccatcatacctgaccggagaattccctggtgactacggatgggacactg

SEQ ID NO: 2561 - DNA, 279 bp, Glycine max
  unsure (1)..(279): unsure at all n locations; Clone ID: 700556542H1
aaggcgagcagtgcgaagagaaagaaagagaagaagcgcttatcgaactcggacggaagcactgagttaactcagagcgagtgaaagtgttgctgcgtgatgtctggtggtatcgcccgtgnacgcctcaccgaggagcgcaagtccgtggcggaagaaccatccccatggttttgntgcgaaccggagacgctgcccgatggaaccgtgaacttgatggtgtggcattgcactattcccgggaagactgggactgattgggaaggtggctattcccgc

SEQ ID NO: 2562 - DNA, 283 bp, Glycine max
  unsure (1)..(283): unsure at all n locations; Clone ID: 700556543H1
attaaccacaagcataagcacaagcacaagcacaagcacttctctaattccctttcacactctattacagatttcacaagtgcttacacttcaaatggctttggaagctcttcaatcacccaccancanccactccatcgtttagtccctttganganaccagtctcagttacttagagacaccgtggacgaaaggaangcgttctaagcgtanccggcacggagcaacaactgcaacacccttcatgcaccgaggaagagtacctcgctctttgtctcatca

SEQ ID NO: 2563 - DNA, 282 bp, Glycine max
  Clone ID: 700556544H1
aaaaaccaccaatcaaaaaccatgaatgctaagagagaaaagggagagtgctttgaaaatgggaaagtttagttcaagttacagtacttctgattttgttcactttggagttctacttccctttcttctgttatcacagttgttctttcaacttgcatggtgtggctccatagtaaagttccttcctggattagagggaccccttccttttgttcttgaaaccgggtatgtgggagtgggtgaatcagaggatgtgcaggcattctactacttcattgagtc

SEQ ID NO: 2564 - DNA, 282 bp, Glycine max
  Clone ID: 700556545H1
ctcactaggagctcttctccattggttcttcatctgcatgcacacacttgcatagttttggaaaccaagaatttttgaagggtagcatcaacaagaagttctggaaatggagatcaccaatgtcagcgagtatgaagctattgcaaagcagaagttgccaaagatggtgtttgactactacgcatctggtgcagaggaccagtggactctgcaggagaacagaaatgccttttccagaattttgtttcggccacgtattcttattgatgtgagcaagataga

SEQ ID NO: 2565 - DNA, 282 bp, Glycine max
  Clone ID: 700556546H1
caaagttagaaacaaggagaaagaaagaagatggcaggaaagaaaatcccagatgtgttgctgaattcaggacacaaaatgccagttataggcatgggaacttcagtggagaatcgtccatcaaatgagacccttgcttctatctatgttgaagccattgaggtgggttaccgtcattttgacactgctgcagtgtatggaacagaggaagccataggcctagccgtggccaaagccatagacaaaggccttataaagagtagagatgaagttttcatcatt

SEQ ID NO: 2566 - DNA, 277 bp, Glycine max
  Clone ID: 700556547H1
ttttgatctcatgtatgaacaagttaaagctcttaaggatggaattgctgttgaaaaaccaatctacaaccatgtcactggtctcctggatccccctgagctcattaaaccccccaaaatcttagtcattgaaggcttgcacccaatgtatgattctcgggtcagagatctcttggactttagcatctacctagacattagcaatgaggtcaaattcgcttggaaaattcagagagacatggcagagcgtggacacagtcttgaaagcatcaaggct

SEQ ID NO: 2567 - DNA, 225 bp, Glycine max
  unsure (1)..(225): unsure at all n locations; Clone ID: 700556549H1
aattgagccacttaccatcagatttagatctcccaacagagagtttctcaaaattgccaagtacccttttcaggatcaaggaagagaatcaagaaccaccaaaaggtgtngttctttgttgtagttgtttgtaactgtagcaacatgaagatggttagaaagttggttgtggtgaggctgtgntgggcatcnctgtgttgagctctctccttctgacaacctcgg

SEQ ID NO: 2568 - DNA, 289 bp, Glycine max
  unsure (1)..(289): unsure at all n locations; Clone ID: 700556550H1
gagagtagagtgaaggttaaggccgcagttacttttcaagtctgaggttagacagaggaatcgatgatataacagatttgctcggtaaatctctcctcttagagcttgttagctctgagcttgaccccgtgacgggactagagaaggaaacactgaaagcgtatgcacacaaagcaggaaatggtgaggagtcggttaagtacgangctaaatttgaagttccaaatgattttggagangttggngctgtncttgttgagaatgagcatcacaaggagatgttccttga

SEQ ID NO: 2569 - DNA, 287 bp, Glycine max
  unsure (1)..(287): unsure at all n locations; Clone ID: 700556551H1
cctctctctccgaaatccccaaattgcctgtgaatgctagaaaccctaggcacgttcgatttgatgctctcccatttgcaatcaagggcgagcgcattcggttcttgcacgcaaggctggtactaccgctgcatcggcctcgatccctgaattcatcattctttctcgcaccatctttttctattccgattcgatnnnnnnnnnnnnnnnnnnnnnnnnnnnnnnnnnnnccttccttgacgaatcatcacgatgttgatgagcaagcagaagaagagccagatcca

SEQ ID NO: 2570 - DNA, 279 bp, Glycine max
  Clone ID: 700556552H1
gttcttcttaagagaggtgagtgcagagcaaaaggtggggcacctggattcaaagttgcaattttgggggctgctggaggaattggtcaatccctttctttgctgatgaagatgaacccattggtttcagttcttcatctttatgatgttgtcaacacccctggtgtcacagctgatgttagccacatggacactggtgctgtggttcgtggcttctggggcagcaacaacttgagagtgcatcactggcatggacttggtaatcataccgctggggtg

SEQ ID NO: 2571 - DNA, 282 bp, Glycine max
  Clone ID: 700556553H1
gagtttgttgtgagctataagctagtttatcgtgaggagaatatgaagttgtttgttttctttgttgctgcagtagttttggtagcatggccatgccatggcgcaggctaccaaaggttccctctccgaatgaaaactggctatggtgagcgttcttcggaggtaaaatgcgcaagttttaggcttgctgtggaagcacacaacatccgagcctttaaaaccattcctgaagagtgcgttgaaccaacaaaggactacattaatggcgaacaatttagatca

SEQ ID NO: 2572 - DNA, 278 bp, Glycine max
  unsure (1)..(278): unsure at all n locations; Clone ID: 700556554H1
ggagtttcattttcattaatttttatttctccccttttctcaatgcttttcttaatgttgaatccttcacaaatcgtcaagagttagcccacccagaacaacaacgcgtttcagctggccacacacattcttaatttttttggctggcctatagtaaaaactcatatcaatgtcctcaagaacgttgaggagaagactccatcatggggatgttgatggcaaaaggcaggagcatttggagactcgggatagatcgttnagtgagccttgctggcaga

SEQ ID NO: 2573 - DNA, 280 bp, Glycine max
  unsure (1)..(280): unsure at all n locations; Clone ID: 700556556H1
ctaagctgaaatctgaagctaacttaagggaaatgagatggccaatggcaacactagtcatcgcttcaagctcttgcttttccttctaactctgcactcttcattcgctgagattttcttcgaagagagattcgaagatggatggaagagccgttgggtgctatccgattggaaaaggagncaaggaaaagcgggtaccttcaagcacacagcaggaaaatggtctggggatcctgatgacaaaggtcttcagacatataatgacgccaagcattttgcc

SEQ ID NO: 2574 - DNA, 277 bp, Glycine max
  unsure (1)..(277): unsure at all n locations; Clone ID: 700556558H1
gganaatcanattcaggggaaggtgnggaggatcctgttcgctggaaaccacttacagatntcgtagatggttactctncaactcttcctcatcttaaaggtcttcaaaatggggatactgcaactagtgccatcaancaggttgcttctggaaggnttngtgtcaccccaanattcttggcaaatgctgatcagttagaaatcaagatngcacaaggtgcaaaacctggtganngtggacaattgcctggnaaaaaagttagcatgtatattgccc

SEQ ID NO: 2575 - DNA, 278 bp, Glycine max
  Clone ID: 700556559H1
gctagctagccatgtcgctgaggaaggtcttccgctcccgcaagttctccaaatcgttcaaagaggtgctgccggcggagggcgccgccgtcgagggcggggtcgccggcaccgtcgaggaggcggcgaatgggaataataatgggtggtctagcatgctgccggagatcctcggcgagatcgtgcggcgcgtggacgccgccgaggagcagtggccgaaccgccaaaacgtcgtcgcctgcgcgtgcgtctgcaagaggtggcgtgacatcacgcgc

SEQ ID NO: 2576 - DNA, 271 bp, Glycine max
  unsure (1)..(271): unsure at all n locations; Clone ID: 700556560H1
taaatggataccctttatattatctatctttatattatctataaagggtanagatatccgatgtgaatctatttgtttagttttctatcggtatgtatataggtgaataatccaacatgcctttttgtgaagtaaaaaaactaccctcgatccatgcctcaaaagggttgataataagtaaaaaaaatcaatgaattcatgataaaacccttctgcgtttttttattataaatttttttgtcaataaagggatcaaggggttgggggatca

SEQ ID NO: 2577 - DNA, 281 bp, Glycine max
  Clone ID: 700556561H1
cgttttgcagccatggaaacaggcatagcatgctacactcgcgggcctttcctgcctagtgtttcttccaagcactctccaccctccatctctccatcttttggcttgaggagtctgaaatcgagctctttatttggagaatctctaagagtggcatccaaatcaacactaaaggtttcaaagacaaagaatacttcactcgtgaccagatgtgaaattggtgacagtctggaagaattcctcacaaaagcaacaccagataaggggttgatcaggttgtt

SEQ ID NO: 2578 - DNA, 283 bp, Glycine max
  unsure (1)..(283): unsure at all n locations; Clone ID: 700556562H1
ggnacaactacaacagcaatgacttttggaaattcagtgaccagttgaggcttgaatctggtttggccaatctgtctctgaatgattattccatttggagcaacagctacagctccaagaggcctgatcagaggaggaactttgatgtcaagggcagtgatttcaacaactcatcaaagccttttgatgatgatttcaatgatggctggaagatcaccaattccaatggaccccttttctctatgcctcacaacaacaacactcacactcttgaagttggagg

SEQ ID NO: 2579 - DNA, 286 bp, Glycine max
  unsure (1)..(286): unsure at all n locations; Clone ID: 700556564H1
tttcataagaaacccacaacatgttagaaacccagcagcgccggaacccccaacaactatatttatctccctctttctcacacttccacaattccaatcacaatcttctcnaattaacctcctctctcactattccatcttcttaattactcatcactcttcttagaaactagtctaacaattaggttttgaagggcacacaaatatattccaaggttgtgtgaaaatgcgaatgagttgtaacggatgtcgtgttttgcgcaaagggtgtagcgaagattgtagc

SEQ ID NO: 2580 - DNA, 292 bp, Glycine max
  Clone ID: 700556565H1
cgagaaatggcgatggcaatggcgcttcgcaggctttcatcttcaattgacaagcctctgcgccctctcttcaatgccggttccctctactacaagtcgtctttgcctgatgaagctgtttacgacaaggagcgacccggagttacatggccgaagcagttgaatgctccacttgaggtcgtggatcctgagattgctgatattattgagcttgagaaagctaggcaatggaaggggctagaattgataccgtcagagaatttcacctctgtgtctgtgatgcaagcgggtg

SEQ ID NO: 2581 - DNA, 293 bp, Glycine max
  unsure (1)..(293): unsure at all n locations; Clone ID: 700556566H1
caacttgctatatgcaagntaccccatagtaactttacgtcactcgggttggctccattatntgataagagtgtcgtgnangttgacaagtttaattttggacgantgtgatagtttaacagagataccagatgtatcctgtctctcaaaattgganaaattgtcatttnanacattggnaggaatttatttncaattcacccttcagttggttnnttggacaagcttaanntcntgggngctaanggttgccganagcttgaganacttccaccgttgangtngcancctcc

SEQ ID NO: 2582 - DNA, 284 bp, Glycine max
  unsure (1)..(284): unsure at all n locations; Clone ID: 700556567H1
atcttgatataatgcaagggttgcagtggcctggtttgtttcacattctagcttcaagacctggtggagcaccttatgtgaggctcacggggcttggtacctctatggaagcacttgaagccacgggaaaacgtttgtctgattttgcaaacaaactttgccttccctttgagttcttccctgttgctgagaaagttgggaaccttgacnctgagaggctcaatgttagcaaaacagaagctgttgctgttcactggttgcaacatccctctatgangtcatgg

SEQ ID NO: 2583 - DNA, 278 bp, Glycine max
  Clone ID: 700556569H1
cgattttgtcagttgaagacatcattgctttgattggtgataagtgcgatggagttattggacagttgactgaagactggggagaagagttgttctctgctttgagcaaagcgggaggcaaagctttcagtaacatggctgttggttataacaacgtggatgttgatgctgcaaacaagtatggtgttgctgttggaaatactcctggagtgctcactgagacaacagcagagttggcagctcactaactttggcagctgctagaaggatagttgagc

SEQ ID NO: 2584 - DNA, 278 bp, Glycine max
  Clone ID: 700556570H1
cagcttctgaatcgccatcgtgtttttgtcgttgtcgttgttgcaacagatagatttgactctttatgacccgaaggctcggaaacttcagagttgatttcttgtgaccaagagttttgctctgccacttatgacggtccaattcctggttgcaagtctgaaattccatgcccctacagcataacttacggagacggaagtgcgactactggatactatgtccaggattatcttacttataaccatgtcaatgacaatcttcgtacagcaccacaaaa

SEQ ID NO: 2585 - DNA, 146 bp, Glycine max
  unsure (1)..(146): unsure at all n locations; Clone ID: 700556571H1
cttctatgctagaagcacttcaatgggttggtggatttncagancaacactgtttcgtgaattgtacttccctcancctttactgtcntcaaagnngcaagcatcctcagaattacttcatncaggtncncctcctganttgnnnc

SEQ ID NO: 2586 - DNA, 277 bp, Glycine max
  unsure (1)..(277): unsure at all n locations; Clone ID: 700556572H1
ggaaaagagaatttgcagttgatgtatagtgatggcgagaaagcgtttggtacatcaagtgacctctttattgatgaaagattgaaaattgcattagatggcatcatagtggttaacatggaaatatttcgccctcaaaatttagacagtccagttgagaacaccttaaaaggaaatgncgaattaccaccagatgcctgtggcttgacaaggggaagctgttggatgctctccataaagctgctcatgctgctcttgcaagctgccctgtaagctg

SEQ ID NO: 2587 - DNA, 275 bp, Glycine max
  Clone ID: 700556573H1
gggagcgggttttcttcttccaccccttctaatttctctcttctctgaagctatcagaggctagagttctcctattcagtatctcatgtgcttcaaagaatggctgttagctttactgggcttgacatagaaggcagagaccagacagaagagaacatgacaatatgacatctatctagtggagtaataatttatttgtgatggatgaaactgaagtggaaaatcccatattcatggaattaattctgaagataagagaaatgaaaatcaagagt

SEQ ID NO: 2588 - DNA, 276 bp, Glycine max
  Clone ID: 700556575H1
gcaaaactaagaatgaaggaggagttggtggttgaagaagggtaccttttcaaagaagagactcacttcacagtgcttcaaaacctctctcttcttcaacggtgatggcttcgctgtctacgattgcaaaggccaactcgttttccgcttcgactcctacggtccccgcgcgcgtgacaaggacgagctcgttctcatggatccccatggccgttctcttctcactctccgccgaaagaaaccgagtcttcatcaagctgggaaggcttcaaaggg

SEQ ID NO: 2589 - DNA, 278 bp, Glycine max
  Clone ID: 700556576H1
gagaagtcttaaggttagatgggatgaaacatcaaacataccacgtcctgagagagtttcacaatggaagatagagcctgctcttgcacctcctgctctgaatcctctaccaatgcccaggcctaaaaggcctcgatctaatgtggttccatcatccccggattcctctgttcttactcgtgaagcttcatctaaagtcagcgtagatcctttgccaacaagtgggtttcaaagggtcttgcaaggtcaagaatgtcgaccttgagaggtaattttgc

SEQ ID NO: 2590 - DNA, 279 bp, Glycine max
  Clone ID: 700556577H1
ctcaatctttgttcatcaaagtgctgcatctctctcactctcttacttaactcgacaacttcagccacattattccatggatgccaaggtattcaaattccagatcctccaaggctccatcgctaagcgcgtggtcattcgctcaatactactcgcgtgcgccgtctcaattgtctccatctaccgcgcgcaatccctcttcgatttcggaaccctcgctcccatcgccacgtacttcgactgcgtttccggcttcgagggcgtcacctttcgccctgg

SEQ ID NO: 2591 - DNA, 279 bp, Glycine max
  Clone ID: 700556578H1
tagtttcttacaaggctctactctactgcttcaccttctgctctagaaaattcagtggtgatacatggcttcggctactctctctgtagccaaaccagcccttcaggcaaatgggaaaggcttctctgaattctctggcctccgcagctcatcaggcttccttcccttttctagaaaatcttcagaggatttccattctgtcattgccttccagacctatgcagttggaagcagtggaggatacaagaagggtgtgacagaagcaaaactgaaggttgc

SEQ ID NO: 2592 - DNA, 275 bp, Glycine max
  unsure (1)..(275): unsure at all n locations; Clone ID: 700556579H1
cgaactacccacgtnctgctccttcgcagatcatttcgcgtntagcttccacgaaagatggcagacaatgaggatggaggggataagacatctcgtgggaatgaatgggaggttgtatctctcacagcatcaacatatgnngctgctcctggtcctgatgaagttgagatgaaggatgatgggaaagaagatgtatatgggcaggatgaaggagaaacgtcacatgcttattcagtctagacactntgtcttccacccatcagcagaaaattgcc

SEQ ID NO: 2593 - DNA, 285 bp, Glycine max
  unsure (1)..(285): unsure at all n locations; Clone ID: 700556580H1
tagaatacagcatttcatttctcatcatcaatggctttctcttgtaaacttgancagcttcattctctctgcctatacaaccccaaaactccattctcccactttcaattccaaccttcctccttccttccatctccttcttctttgaagcctcagaagcttcccttcagaattcgctatggttctacnatcagagccacgtcatcatcctcaaccccttccgcaaccattgcngaacctgaaggcataagattaaatcgattccaaccanncccattgatggnc

SEQ ID NO: 2594 - DNA, 273 bp, Glycine max
  unsure (1)..(273): unsure at all n locations; Clone ID: 700556581H1
cccattcttggccaaaagtgatgtggtgttggaaatttgtggattgaattgtgactaaaggtaacaaaaaatggaagggcatgccatggtttgacgttttacactgataagatctgcaacatgcataagtttttggtcaaagacacatgacacatccctggatctgttggtgagaactgccactgcaaaaaaaaatgttatttgtgggtggtgttgtaganacaacatatgtttgagagttcnatattttttttatacatgggcatacnnaat

SEQ ID NO: 2595 - DNA, 277 bp, Glycine max
  unsure (1)..(277): unsure at all n locations; Clone ID: 700556584H1
tgcttcaccttctgctctagaaaattcagtgctgaaacatggcttcggctactctctctgtagccaaaccagcccttcaggcaaatgggaaaggcttctctgaattctctggcctccgaagctcatcaggcttccttcccttttctagaaaatcttcagaggatttccattctgtcatgccttccagacctatgcagttggaagcagtggaggatacaagaanggtgtgacagaagcaaaactgaaggttgccataaacgggtttggaaagatggaa

SEQ ID NO: 2596 - DNA, 278 bp, Glycine max
  Clone ID: 700556585H1
gtggaagcacaaggattccaaaggtacaacagcttttgaaggactactttgatggaaaggagccaaacaagggggtcaaccctgatgaagcagttgcctatggtgctgcagtgcaaggaagcattttgagtggagagggtggtgaagaaaccaaagatatccttctcctggatgtggctcccctcactctcggaattgaaactgttggtggagtcatgacaaagttgattcccagaaacactgttatcccgaccaagaaatctcaagtgttcaccacc

SEQ ID NO: 2597 - DNA, 275 bp, Glycine max
  Clone ID: 700556587H1
aacacaacaacactctctcttctcgctcttggcttttcgctcttcactcactctcattcattcatttccaccgttcatggatccagtaagcgtgtggggtaacacgcccttggcgacggtggatgccgagatccatgacctcatcgagaaggagaagcgccgtcaatgccgcggaatcgagttcatcgcctccgagaacttcacctccttcgccgtcatcgaggccctcggcagcgctctcacgaacaaatatccgagggcatgccgggcaaccg

SEQ ID NO: 2598 - DNA, 273 bp, Glycine max
  Clone ID: 700556588H1
gcgcctctcatccgtgatgggcgtatggagaagttctactgggcaccaacaagggatgaccgcattggtgtctgcactggaatttttcgcaccgattcaattcctgaacaggacgttgtcaagattgttgacaccttccctggccaatccattgatttctttggtgcactgagggccagagtatatgatgacgaagtgaggaagtggatttctggtgttggtgttgacggcattgggaagaagctgtgaactcaaaagatggacctccaacct

SEQ ID NO: 2599 - DNA, 274 bp, Glycine max
  unsure (1)..(274): unsure at all n locations; Clone ID: 700556589H1
ggagatgttgatcttgaagactatactgaagngttgattgttagtcttgacccatcaaaagctgttgccaataagatccccacgccgcctccgaagaagtatactgcaataaacatgcttgatggcaggaacagaattattgaatataagaatcctactctttacaaggatgatgaaaagttgaaggccttgagtgggatgaaagaaacagggtatgttcctgacacaagatatgttcttcatgacattgatcaggaagcaaaagagcaagcct

SEQ ID NO: 2600 - DNA, 271 bp, Glycine max
  Clone ID: 700556590H1
atagtaatatacataagtaacataaccaatggaagcgcgtgcaggagccatcagcgtattgcaagaatctctgctcatcttcagcctccaaatttccaggaagggagtgatgttctcttaagagtgctgagtgcagagcaaagggtggggcacctggattcaaagttgcaattttgggggctgctgggggaattggtcaacccctttctttgctgatgaagatgaacccattggtttcagttcttcatctttatgatgttgtcaacacccc

SEQ ID NO: 2601 - DNA, 273 bp, Glycine max
  unsure (1)..(273): unsure at all n locations; Clone ID: 700556591H1
gtttcaaatggaaccaaacaccgggagtgactttgatgatgttggctggggtggatnaagccaagcaggactttatggaggtggtggagtttttaaagaagcctgagaggtttactgctgttggggctcgcattcctaaaggagttctcttgttggtcctccaggaactgggaanaccttgttagccaaggctattgctggtgaagctggtgttccatttttctctatatcaggttctgagtttgttgagatgtttgttggtgttggtgcttc

SEQ ID NO: 2602 - DNA, 278 bp, Glycine max
  unsure (1)..(278): unsure at all n locations; Clone ID: 700556592H1
ttgctccctcagcagcnaagaagaagccacagagaactagtactcnctantctcacccgcaagannnaaatggcatctcacatcgntggatacccccgtatgggtcccaagagagagctcnagttcgtnctcgagtctttctgggatggcaagagcagcgccgaggatttgcagaaggtgtcttctgatctcagggcatccatctggaagcagatggctgntgctgggatcaagtacatccccagcaacactttctctnactatggccagttctcnac

SEQ ID NO: 2603 - DNA, 276 bp, Glycine max
  Clone ID: 700556593H1
cttggcatctcttagcaccttccagcagatgtggattgcaaaggcagaatatgacgaatctggtccatcaattgtgcacagaaagtgcttctaaactgtttcgatagatagggttattgaagggaaagactactatcatcacgatttgtctggaagcaatgcattgcagattgtaaccctttgattctagcttttgttatcctttcattttattctcttgttggagtgatcatttatttgcagaaggtgaggagagttgttttttaaaatggtcca

SEQ ID NO: 2604 - DNA, 278 bp, Glycine max
  unsure (1)..(278): unsure at all n locations; Clone ID: 700556594H1
ggntcnagccganttgaaatcatcgccaacgaccaagggnacagancgacgccgtcttacgacggcttcacngataccgagcgtctcatcggtgatgcggctaagaaccaagtngccatgaaccccatgcaacaccgtcttcgatgccaagaggttgattggtcgtagattcagtgactcctctgttcagagtgatatcanattgtggccttttaaggtcattgctggtgctgctgacaagccaatgatcgtggttaatacaagggtgaanagaagcc

SEQ ID NO: 2605 - DNA, 299 bp, Glycine max
  unsure (1)..(299): unsure at all n locations; Clone ID: 700556601H1
ctttctccggccggattccgncggagctcggcgattgtattagtttantatgntnagnnctgaatgtcaatatgttcancnngaccgttccgccggagctgttcaagcagtcngggaagatcgccgtgaatttcntcagtgggaagacgtatgtgttataaagaacgatgggagcaaggagtgccatngtacggggaacttgcnngagcntgcggggatcagtcagcagcngctgaacaggatttcgacgagtaatcccngnatttcactagggtttatggaggtangttgcagcnaac

SEQ ID NO: 2606 - DNA, 293 bp, Glycine max
  unsure (1)..(293): unsure at all n locations; Clone ID: 700556603H1
ggtggttgatcgagctacacctaaggatgatgactttaagccaattggcagaatgccgctgccgcagccaacacaaggaggatatggcgcatacaatgcttatatttcagcagccactagatatgcagcacttggtgctcctactttgtatgacancctggcccaatttatggaagaggagacccttctcggagaactagtaaganaatttttgttggccgtcttcccccagaagcaacttctgatgatcttcgtcaatattttggaagattggtcgtatatagatgtttagt

SEQ ID NO: 2607 - DNA, 290 bp, Glycine max
  unsure (1)..(290): unsure at all n locations; Clone ID: 700556606H1
tgaattcctcttattcaggaatttggagagactgttgatatagaaaggtaggataaaccagtggccaaggaatatatggcgttttctatggttttcattgttagcaacattatgctgcttttcagttcagcatttgccaaaactgctagtctccctctctgagcccaactccagcaccanccccggcacccgactacgtgaacctcaccgagttgctcagtgttgctggtccatttcacaccttccttggataccttgagtccaccaaagtgattgacactttccaaaac

SEQ ID NO: 2608 - DNA, 291 bp, Glycine max
  unsure (1)..(291): unsure at all n locations; Clone ID: 700556608H1
atctcatagcactcaccccagaaaagcaccgtcacttgttcgtttcaacgttcttctattgatacgtnaatgctttttgattcctttcagantntnctnactaactanctatctgtnaatcaaagaaatttcagtgtacgtttcgtctgatttttgggntactgcttgagctcgatgggagatgtggctaaggaccttncagctgggactgttggaggggcagcacagttgatatgtngacacccctttgacaccatcaaggtcaagctccanagccagcctgcnccactc

SEQ ID NO: 2609 - DNA, 288 bp, Glycine max
  Clone ID: 700556610H1
cttcttctttggttgttgttggctctctccatcttacttcacagaatggttacaaagtgtgggaagatccttctttcatcaagtggaggaaaagggaccctcatgttaccttgcattgccatgaatctcttgaaggatctcttaaatattgtatcaacgcaataaagtggattttttggcttcccagtcagctgtttggaatgatgatgctgttcaggggtctcttgactgtgctgcattttgggtcaaagatttgccttttgtcaagtccttgtctggatattggaa

SEQ ID NO: 2610 - DNA, 290 bp, Glycine max
  Clone ID: 700556611H1
gttgaaattaagccagtgggtcccactgtatctgaaggagctgattcaacaaatcagaactcaaaagttcaaggcggttcattggattctcgtaagcttgatacaaaaaagcagaatgatgttgttcattggcataacaggggggtacctgcccgaccattacatttatccaggggagtggagaaaccaagtgggagggtcacatacacagttgttcttgaaggtttatgcagatttagtgtccaggaactgagcacaagaggaatataccatactgcgaggataacttc

SEQ ID NO: 2611 - DNA, 289 bp, Glycine max
  Clone ID: 700556612H1
gaacgaagggtttttggcggggcagaggcaattgttgaagacgataaagaggaggaggcacgtgacagtgacacagacacagtcacacgagggaggaagtggggcttgtgttgaattgggggagtttgggttggaaggtgagatggagaggtgaggagagacaggacagtgttgatggctgaaattgtgaggttgagacaacaacagcacaactcgagggagcaattgttgtccatggagactaggttgcaagccactgagaagaaacatcaacagatgatgaattttc

SEQ ID NO: 2612 - DNA, 290 bp, Glycine max
  unsure (1)..(290): unsure at all n locations; Clone ID: 700556613H1
ttccattctanagtcgngatcggaatttacatacactaggattctacatatccataagatagtgnaacataatatgtgctttgnntttctgttctcccctctcaccatgttagatgggangggggatgataaccaggtttgaggtttgatctatgagcctgggtactatcaccacttgaagtatactaagtttattaggtcctataacatgtcnttccctatagnatttatatcatatagnatgtcctataatatctatttttcaaagccctgtatgtaacatgtcctat

SEQ ID NO: 2613 - DNA, 294 bp, Glycine max
  Clone ID: 700556614H1
caacctctcaagtccaacctacccctttttcttctcccaccaacttcaccgtcttcttcctcgatcatgtctcacttcaagggcaagtaccatgatgagcttattgccaatgctgcttacattggcactcctggaaagggtattcttgctgctgtgagtcaacagggacaattggcaagcgtttggccagcatcagtgtagagaatgttgaatccaacaggcgtgctcttagggagctgcttttcaccgctcccggtgctcttaaatatctcagtggtgtcatcctctttgagg

SEQ ID NO: 2614 - DNA, 295 bp, Glycine max
  Clone ID: 700556615H1
gcagaggggaaggggaagaagagtgtgagtaacaaaggaactagtacggcagcggctagttttggttttcgcgaactcgcagaggcaacgaggggtttcaaggaagtgaacttacttggggaaggtggttttggaagggtttacaagggtcgtcttcaacgggagagtatgttgccgttaaacaattgattcatgatggtaggcaaggttttcatgagtttgtgacggaggttcttatgttgagcctgctgcacgattctaatcttgtcaagttaattggctactgcactgatgg

SEQ ID NO: 2615 - DNA, 97 bp, Glycine max
  unsure (1)..(97): unsure at all n locations; Clone ID: 700556616H1
caatccccttncctncttctctttctatccaaatnctncaccagcccatggcagtntgcttgcagcaacagcttcctgccaaacttcatactattgc

SEQ ID NO: 2616 - DNA, 293 bp, Glycine max
  Clone ID: 700556618H1
ccatcctcaaaatctccaaactcgcgatcctcctcgttttgttcgcttcagtctgcaacgtcgctatgtcggactccaccgccaaacccctcgaccagcacgccaccacgggctctgaccctactgcgccagggttcacatcgtgtacaccggagaccacagaacgaggagcctgaggcctaccacatcagaaccctcacttcagtccttggcagtgaggaggctgcaaaggaagctttgttgtatagttacaagtctgcagccagtgggttctcagctaagcttactccgga

SEQ ID NO: 2617 - DNA, 292 bp, Glycine max
  unsure (1)..(292): unsure at all n locations; Clone ID: 700556619H1
ccggaattgataacaaatataacgggctgattcattcaaaattgaatcttataacctatcagctaaatatttagctaattgtactattttgactgccacacccaagcatggagcttcntatgtatagagaagtatncttaaanctatgggaggcttcatgcaagatttggccctcagttggcagctggaaattcattctttctggttagnaactggctggggtttgacccaactaactactttncncgtttttnttacacattaancgtanttaataatgcnggtaccatgt

SEQ ID NO: 2618 - DNA, 288 bp, Glycine max
  unsure (1)..(288): unsure at all n locations; Clone ID: 700556622H1
cgaccaaactcactcttaacattatttatagctatggttgaacagtgagcaccaaactgaattgnaattgcaccaaatccacaaaaggcagcacacttacacactannatgttcantgatgctataaacacacttgtgtgtgaagttatattcctagaaaagaaatattactatccttttgaaaatcatttgaaatttttaactccatcttcctcacctctggatctgatcttcgcacggtgccatggatcgaatcctgaaagcggcgagagcctctggttctctcaa

SEQ ID NO: 2619 - DNA, 287 bp, Glycine max
  Clone ID: 700556623H1
cggcgaagaaccaggtcgctatgaacccaaccaacaccgtttttgatgctaagcgtttgattggaaggcgtttttccgatgcatcagtacaaggtgacatgaaattgtggccgttcaaggtgattcctggccctgctgagaaacctatgttgtggtgaactacaagggggaggagaaacagttttccgcggaagagatatcctccatggttcttatgaagatgaaggagattgcggaggcgtatctaggttccaccataaagatgcggttgtcactgtgcctgctta

SEQ ID NO: 2620 - DNA, 288 bp, Glycine max
  Clone ID: 700556624H1
gaaattatcaatataatacttttgcccaacaacgtgttccgcgagtgttttttagatcaattttatgagtacagtttattcaaataagttagagaaactttataagttggagtagtagtttattttttgaatttgtgattttgaaacacgcatattcttaaccatatttacatttattaagaatcatctgtctaatcatacatttacatttacatttacttattggattgttaaaatattcgtgggaataacgtagatatttacggtttctgctattttcttgtttac

SEQ ID NO: 2621 - DNA, 56 bp, Glycine max
  unsure (1)..(56): unsure at all n locations; Clone ID: 700556625H1
atcatttaatcatttgttcaaaaccagccagtttgaaggttgtcctttataantgt

SEQ ID NO: 2622 - DNA, 280 bp, Glycine max
  Clone ID: 700556628H1
tttaaacgaagccttccccgttactgtactcaatttattgagatatgcatacatgctatgtgccgaccatggtccttgtgtctctggtgctcacaatactattgtgacagcaagggcagggaaagacctagtttccagtctgtatcaggtttgctaacaattggtcctcgatttgggggtgccatcgatgatgctgctcgctacttcaaggatgctcatgacagggcacttactccttatgagtttgttgaaggtatgaaaaagaagggaattcgtgtgg

SEQ ID NO: 2623 - DNA, 288 bp, Glycine max
  unsure (1)..(288): unsure at all n locations; Clone ID: 700556629H1
gaaatataaaagtttatttcctctgatcgtgtggtttctgagttctaagcactcacctctttcatacacgtttgttcncttgttgagaagccatgggcgaggatttcgagttcccaagtgctggcaacatggaaatgcctgaggaggaaagtttgagagtccgatcctgaaggttggggaggagaaggagattgggaaaatggggctgaagaagaaattgctcaaggaaggtgaaggttgggacacccctgacagtggagaccaagttgaagtgcattatactggaac

SEQ ID NO: 2624 - DNA, 290 bp, Glycine max
  unsure (1)..(290): unsure at all n locations; Clone ID: 700556630H1
gcgaaaacgaacaagaccaaaacgaggtcgtttcgtttcacaggcttcctgattccccggaatacccctggtggcaagtgtctccgttgttccncagcnacctggagggagatttggattcggagaagttgagggattggtttctcggaanattgctagctggggacttgttctgaattcattcgcggagttggagaagccttattttgagtttctgagaaaggaattggggcacgatcgtgtgtgggcggttggaccgttgctccctgaggacgcgaaagaggagcgag

SEQ ID NO: 2625 - DNA, 294 bp, Glycine max
  Clone ID: 700556631H1
gaaaacacagggaaagaaagagttgagtgatggcggcttgtctgcaactgtggcaatgcaaactagcgagaccctttgactcattaccggtgcgaaggtcaattcctttgagtctgaggtgttcggccgcgccctcttcttccaagccgacggctcctacagcatcactctcatccccggcgacggcatcggccccgaaatcatctcggtggccaaagacgttcttgtcctcgccggttatctcgaagggattaaatacgattccgcgagatgcttatgggtggagctgcattg

SEQ ID NO: 2626 - DNA, 300 bp, Glycine max
  Clone ID: 700556632H1
caagcttcgtctcgtaaagaaaattccaaagctcaacagagaaaatgaggacagtgctttcgcgcttgatccattccacgccttccatttccaggatcaatgccacggtagtgtcaatcagcgggagaaatctcttctttaaagttgaagaagcaggactgtaaatgtggctccacatctcttctttacatttgaagaaaatgggcctccacccccaacggaaaagttggttgtgtttggaggcaatcggtttgttgcaaaacacatttttagagaagccctagatcgtggcgagtctgc

SEQ ID NO: 2627 - DNA, 291 bp, Glycine max
  unsure (1)..(291): unsure at all n locations; Clone ID: 700556633H1
ccatcctcaaaatctccaaactcgcgatcctcctcgttttgttcgcttcagtctgcaacgtcgctatgtcggactccaccgccaaacccctcgaccagcacgccaccacgggctctgaccctactgcgccagggttcacatcgtgtacacgagagaccacagaacgaggagcctnncgcctaccacatcagaaccctcacttcagtccttggcagtgaggaggctgcaaaggaagctttgttgtatagttacaagtctgcagccagtgggtttcagctaagcttactccgg

SEQ ID NO: 2628 - DNA, 289 bp, Glycine max
  unsure (1)..(289): unsure at all n locations; Clone ID: 700556634H1
tgcttggagaccacanaggcgaaagcaggacctttaagcttcctaatcccatgtactacattgagtagtaccttcacctctctcaacaatctagctagagtttgctcctatctatatgtaataaggtatgctgatatgcactattcaataggagcattagctatgtttgttaatgtcactttatgttatgtgggtaagtcacctaagacactccacgtacctacttgttgtctcttacgcggctttaataaatcttctgcccttgttccatatttactaaanaaaaaaa

SEQ ID NO: 2629 - DNA, 241 bp, Glycine max
  Clone ID: 700556636H1
aggcaactccttcaggaacgcagtgccgccgattccagccaccacgaagccaccgccgacgaacgacgtgacgaatcaggttcaggaatgggagtgcagagtgagggtattcgtgtgtcagagtcagaaacaaggggaaatggtgtgcctggccctgatttttggtcctggacaccccctgtggagagtgatgttccttcagatgatggcagtgggctgcagttagataccaagtcttctg

SEQ ID NO: 2630 - DNA, 95 bp, Glycine max
  Clone ID: 700556637H1
gctaaatccaccaatattatcctgttcactctgttggcttgtatagattaacaccttattgtaaattagaatgaactgtcagcagcattcgctcc

SEQ ID NO: 2631 - DNA, 282 bp, Glycine max
  unsure (1)..(282): unsure at all n locations; Clone ID: 700556638H1
caagccttcagatatttcccttctgagctttgattagtgtggcctagttgtnnttttctcgatgatanangcttcttccactatgcattgcgcacttctgcgcttttgggttccctngttgctgcttgctagcttcagctatgcccttctgcttcggccacaactgaaattncagggantgnngtgancanagatgggnaggtgataantgaagagttagcnnnancaagtctacnaggncatgnngnngagtccagttcnnaggatttactccacaaccat

SEQ ID NO: 2632 - DNA, 282 bp, Glycine max
  unsure (1)..(282): unsure at all n locations; Clone ID: 700556639H1
acaaggcaagggaaaagcgaagtgtgaagacagacacantgagaatgatgangcgtcggttccttttggttctcttggttctctatgtcacagtggagttctacgtagaagcagatggtagtggtgggtttgtgagaacaagagagtgcagcttatgctgaatgggagcccctactatgctaatggctttaatgcctattggntaatgtatnttgcctctgatccttctcagagaaacaaagtctcatcagtgtttcaacaggcttcaaatcatggcctcaa

SEQ ID NO: 2633 - DNA, 283 bp, Glycine max
  Clone ID: 700556640H1
gattcatgccgcacctcctccgccgccacagccacagccacagccacagccgttgaatactatccctttgctcccaatgatgacggtgccctcggtttctccgacggggatggcgccgtttaattttagcgcagagtttctggcgggatgcaggaaatgataaggaaggaggtgaggagttatatggagttgcacaatcagaagaatgggatgtgttttcaggctgcggtgaatgatgggtttaggaagcttcggtgaagcgtattggaattagcagggttga

SEQ ID NO: 2634 - DNA, 282 bp, Glycine max
  unsure (1)..(282): unsure at all n locations; Clone ID: 700556641H1
agaagaacaagtagttgagaactaagaaggagaagcaaatggcttcctcaatgatctcttccccagctgttaccactgtcaaccgtgccggtgccggcatggttgctccattcactggcctcaagtccatggctggcttccccaccagaaagaccaacaatgacattacctccattgctagcaacggtggaagagtgcaatgcatgcaggtgtggccaccagttggcaagaagnagtttgagactctttcctacctgccagaccttgatgatgcacaattgg

SEQ ID NO: 2635 - DNA, 282 bp, Glycine max
  unsure (1)..(282): unsure at all n locations; Clone ID: 700556642H1
ggatccagaaactctagccaatcctagttgtatgctgtcttcagctggctgaatgatttgttagatggtttgccgagatgaagacagcatacaactagagcatgtattggtcaaacgggtatcatcagctgaagaaagttttgaagagcgctacaatcattttcctcatgagtgncgatgattgaatttctttcaagagttgaatggtgtgaggtcttcccgtgcaatttttacaccttatcgtggctattgtattggttgcgtatcttagaacataatcaa

SEQ ID NO: 2636 - DNA, 252 bp, Glycine max
  unsure (1)..(252): unsure at all n locations; Clone ID: 700556643H1
tgttaggcaatacaacatttattacgcatactcaaagtagcttcgaagttcgtatttttattggcatatcatggagaataataatcagtcgttttggcaattcagtgaccagctaggttacaggcatctaatttggcgaacctttctctaaacgattcgatttggngcaacagttacatctccaagaggcgtgatgaaaggattaattttgacatcaaagttgggggtgagatcaactctttcaagtcaaag

SEQ ID NO: 2637 - DNA, 284 bp, Glycine max
  Clone ID: 700556644H1
gggaaccccaatttgccctctgccggtctctacttcgttctgggcctgcagcatcacttcgtgtaaatattagagcattccccaaaattttaaagtctgatggcaagcttctatttgatacggaaactactcactttggttgttgtgtctccattagatagaacattgcaaagtacttgatacagccatacttgactttgttatcaagcaaatttcaaaagactcctaaacaaacacagaacaaccaacagcttcaatgattgttgttcaaagcttatgccatt

SEQ ID NO: 2638 - DNA, 276 bp, Glycine max
  unsure (1)..(276): unsure at all n locations; Clone ID: 700556645H1
cagccacagccacaggtgtatgaacagcaatatccccagccacagccactgctnctttaaggtccaaagttggaagtactgtcaactttggaccttaaagcaccattgagggatgagacccatcaacagccacagcacagccacaggtgtatgaacagcaatatccccagctgcagcagtggctgtggctggcaggcattgtcacatcgagtgagttacgtgtgggttgtggaagaggatggaaccttgacggggattgttactttccaaggaatg

SEQ ID NO: 2639 - DNA, 278 bp, Glycine max
  unsure (1)..(278): unsure at all n locations; Clone ID: 700556646H1
taaatggataccctttatattatctatctttatattatctataaagggtanagatatccgatgtgaatctatttgtttagttttctatcggtatgtatataggtgaataatccaacatgcctttttgtgaagtaaaaaactaccctcgatccatgcctcaaaagggttgataataagtaaaaaaaatcaatgaattcatgataaaacccttctgcgtttttttattataaatttttttgtcaataaagggatcaaggggttgggggatcaaatggtaa

SEQ ID NO: 2640 - DNA, 293 bp, Glycine max
  Clone ID: 700556648H1
ggccacccacgcggctcttgcttctacaaggatcccttcaaacacaaggttcccatccaaggcctctcactctttcccaacccaatgcgccttaaagagacttgaggtgacagaattctctgggcttagaaccacttcatgtgtcacatagctaacagtgctagagaatcttccttttttgatcttgtagcttcccaactcactcccaagaccaatggatcaactcctgtgaggggagagacagtggccaagttgaaggtggcaatcaatggtttcggacgcattggtagaaa

SEQ ID NO: 2641 - DNA, 281 bp, Glycine max
  unsure (1)..(281): unsure at all n locations; Clone ID: 700556649H1
gttacggtgcaacctagcagcctccaaatccaatggcttcagagaagaaactttcgaacccaatgagggagataaaagtgcagaagctcgtcctcaatatctctgttggcgagagtggagatcgtctcaccagagccgcaaggtgttggaacaacttagtggatncnaccccagtgttttccaaagcaaggtacactgttcgttcctttgggattagaagaaatgagaagattgcatgctatgtcactgtcagaggtgacaaggcaatgcaacttttggag

SEQ ID NO: 2642 - DNA, 286 bp, Glycine max
  unsure (1)..(286): unsure at all n locations; Clone ID: 700556650H1
atcacttccctnaccatggccgagtcctgcctcctctcttctccctgcctcactcttccacaccaaaaccanannctctctctttacacncccctccaaanccctcacactccaattttcatgnctcaactcctccgtctctctctcctcgccgcaccaactcaccgttctccccttgtaactttcgtggcccaaacttccgattgggctcaacaagaagaagaacagagcctcgctgaaaccgaagcgggcctggaaagttgggagcccaaggcgaagagccggc

SEQ ID NO: 2643 - DNA, 285 bp, Glycine max
  Clone ID: 700556651H1
caagctcatcctagagttttaaaaatggcagcagcctcctccatggctctctcttccccatccttggctggcaaggccgtgaagctgggcccatcagcccccgaagtcgggagggtcagcatgaggaagaccgtcaccaagcaggcctcctccggaagcccatggtacggcccagaccgcgtcaagtacttgggcccattctctggcgagcccccgtcctacctcactggcgagttcccaggtgactacggctgggacactgctgggctttcggccgacccagaa

SEQ ID NO: 2644 - DNA, 283 bp, Glycine max
  Clone ID: 700556652H1
ggaattgttgtaactttttgattcctaaattctctaaaattcgaaattctaatttcgttaggggaaagagattgtttgtgtgtgagtgagtatggctggaaaaggcgagggtcctgctatcggaatcgatttgggaacgacgtactcttgcgtcggcgtgtggcaacacgatcgtgttgaaatcatagccaacgatcagggtaacagaactaccccatcctacgtggctttcaccgacacagaacggttgatcggcgatgcggcgaagaaccaggtcgctatg

SEQ ID NO: 2645 - DNA, 282 bp, Glycine max
  Clone ID: 700556653H1
atcatttcccactctcgcgtttcctttatcatatttatattctttggttattcaattcatattacgccatgtcccagttgaacggagcctactacggcccctccatcccgccgccgaaaacttcctaccaccgtcctgggcgcgcggaggcctcggctgctgctgcgggtgcctcttcagcctcatcttcaagctcatcctaaccgtgatcatcatcattggcatcgccgtgttccttttctggctcatagtccgtcccaacgtggtgaaattccacgtcac

SEQ ID NO: 2646 - DNA, 272 bp, Glycine max
  unsure (1)..(272): unsure at all n locations; Clone ID: 700556654H1
cgcgtcgctccgcaccagtttcaccgcacgaatatcttgttgtttggnngcgatncgagaaaaactctgtaaacatgttggtttaccaggacctccttacaggtgatgagcttctctctgactccttccgttacaggaaattgagaatggaatgctgtgggaagttgaggggaagtgggttgttaaaggagcagttgatgtagacattggtgcaaacccttctgctgagggtggaggagaagatgagggagttgatgatgcagctgttaagg

SEQ ID NO: 2647 - DNA, 282 bp, Glycine max
  Clone ID: 700556655H1
ctccttctttctttgtttctgtgtgttcgagattgaagaagatgatgcaggctggacccggcggcatggcccaacaagcgaaccaacaatacgcacagcaacagcaacaaccctacatgatgatgccgccgcagcctcagcccctcagatgtgggccacatcggcccagcctccgtcccagtcggtggctcctccgcaacccaccagcgccgatgaggtccgtaccctctggatcggtgatttgcagtactggatggacgaaaattatctctacacctgttt

SEQ ID NO: 2648 - DNA, 283 bp, Glycine max
  unsure (1)..(283): unsure at all n locations; Clone ID: 700556656H1
gcagaggctgcgcagagtttgaactttgaacgttgaaggaacatagaggcagaggtttttccttctctcaccgtagaatcgaatcgagttcactttgatcgtgtgtgtctccgatcttcaaatccgcaacaaccatggtgagggattgctcaacaagctcgtctctcgctccctctccgtcgccggaaaatggcagcacaaccaactccgcngacctcaacatccacgagtaccagggcgctgaattgatgagcaaacacggagttaatgttccgagaggcgt

SEQ ID NO: 2649 - DNA, 279 bp, Glycine max
  Clone ID: 700556657H1
cagagcccgaaggaaacgtatgtagtagggaaataattgttgagttggaagaaagagtggacaagattgtcaatatcgataacatttactctgatacgcagctttgtgcaacctatgtttgtgacatctacaaacacctactgaatccgaggaaaagaaaaggccttccactgacttcatggacacaattcagaaggacataaatgttagcatgcgcgctatattggttgactggcttgttgaggtggctgaggagtatcgtcttgtacctgaaacatt

SEQ ID NO: 2650 - DNA, 279 bp, Glycine max
  Clone ID: 700556658H1
aaaattgataacatcacacagcattagtatgtatcagcaacaagggtcagatccaacaaagcaatcaccggcaaccggttttccggtgagctatagcaattcaacaacgtattcgaccaacgaggcttcctacgctccagtccacctccccagcccaaacctcttgtcgattggtccaccggcctctgtgactgcttctccgaatgtggaaactgttgcatgacgtgttggtgtccatgtgttacctttggccgagttgcagaaattgttgacaaggga

SEQ ID NO: 2651 - DNA, 216 bp, Glycine max
  unsure (1)..(216): unsure at all n locations; Clone ID: 700556659H1
gtaatttctgccagcctcaaaaaagacttgctctgcctctgccactctctgagtaggactacactgccatggctgcctcagtctccactgttggagctgtcaacggagctccactgagcttgaacagctctggagctggagttcagttcccagttcagccttctttggcaccagcttgaatcaggttattgcctcanggntccctaacgtcaagat

SEQ ID NO: 2652 - DNA, 280 bp, Glycine max
  Clone ID: 700556660H1
agaaagagtggtttgtgcggtggtgaagaagcgttcggaatagaagaagaagatgtcgtcggtttacgttctagagcctccgacgaaggggaaggtggtggtgaacactacgcgcggtccttggacattgagctgtggccgaagaggctccgaaggccgcgaggaacttcgttcagctctgcctcgaaaactattacgacaacaccatcttccaccgcatcatcaaggacttcctcgtccaaagcggcgaccccaccggcaccggcaccggtggtgaaag

SEQ ID NO: 2653 - DNA, 281 bp, Glycine max
  Clone ID: 700556661H1
ttcgtcactctcgtgtcgggtgaaggcgaaaaccaaatcaagatgctgagagtgggcgcaaagaggcttttgggaacgacgtcgttgggcgttagggttccggcgaggctgtaccacgagagggttgtggatcactacgacaaccccggaacgttggatcgttagacaagaacgacccgagcgtggggacgggtttggtgggggcgccggcgtgcggcgacgtgatgaagctccagattaaggtcgacgacaaaaccggaaaaatcgtcgatgctcgattc

SEQ ID NO: 2654 - DNA, 285 bp, Glycine max
  Clone ID: 700556662H1
ctgtcttacaaggtttagtagtgactatggagcagagcattggtggacaatctagcatacaatgcatatttctacgcaaggactgcttctcctcaaagctcgcgtctcttccaacttctccttccgagatgccctttggtcacaaccgttggtttcgcaggttgtcggtttttccacgtttgcaactatgtcaagggctgagaaagggtttctccaaaaacatggcttgcagtgtcagtgtggataatgtgatacggttcatccagcaacagatgcttatgctgg

SEQ ID NO: 2655 - DNA, 288 bp, Glycine max
  Clone ID: 700556663H1
tttgagtttaccaccaacacatattccttacaataggataattgggaagcttgattccaagtttttgttgtggccttcttgtgctcatatcaaacccagaagaatttctacctcaattcgggcaatgggttcctccgcttcttcccctcccagtcacaatatgcagacagcgttgaatctgaagcaggagctgatactattgactataaatctttaaccgatgaagagtggaagaagcggctcacaaatgaacagttctatattactcgtcagaagggaactgaaaga

SEQ ID NO: 2656 - DNA, 283 bp, Glycine max
  unsure (1)..(283): unsure at all n locations; Clone ID: 700556664H1
caatcttctgagagtgtttggttganagtagcaaagatgtttcctttcgggcaanagggtcaaaagataaaggggactatggtggttatgcagangantgtgttggatatcaacagcatcaccagtgttggagggatcgtgaccaaggcttaggcttcataggcagtgcagtcgatgcacttacttttgcagccaccaaaatctccatccagttgattagtgctaccaaggctgatggtgggaaaggaaaaattggaaagagtacaaatttaagagganagat

SEQ ID NO: 2657 - DNA, 253 bp, Glycine max
  unsure (1)..(253): unsure at all n locations; Clone ID: 700556665H1
gaacaagaagagncaatgtnttggtcnaatctcacantgttggtgtcctnaaaancttncctttcngatncntccaatntctcattcagntntgtgctcaanccttttaagtnccttcacaaaanccaacttcatncatgacttcacgntcntcaaccacccaaattcagtgtggtctgagagaactcagaanncgcattgattncgtgaagaacactcagaaaatcaccgaggctatgaagcttgtggctgc

SEQ ID NO: 2658 - DNA, 284 bp, Glycine max
  unsure (1)..(284): unsure at all n locations; Clone ID: 700556666H1
cagatgctgcnggcgatccagancgtnnngggcgcgctcgannccgcatgctctcggcggcggcaagatcanggtctccacngtgcacgccatgtcggttctcanggactctnagtnaccctccggcggaanntntcntcccgaaacgacaccgttttgcaggggttgttgtnnnttaataatgccacgggctngcnctttannattnacccttacccttactttgcctacagaagcgactntggcagngctgataacctngcttatngnctttccancctaac

SEQ ID NO: 2659 - DNA, 282 bp, Glycine max
  unsure (1)..(282): unsure at all n locations; Clone ID: 700556667H1
cctcaaactaactatatctatccattaagggatattcaatgcaattagcgaatgagagaatgaagagccggtggttcgtgtggcttttggcggtactaggcatcatcggagccacactcttcatagtgagtttgatccaaactcggagaacaacttcctatgttccataacaagaacgatnnnnnnnnnnnnnnnnnnnttcaccgatggncccacatcgatgcaatcaaagccatcctccactacgcggacctctcagattgtccctcaacnatctctttc

SEQ ID NO: 2660 - DNA, 280 bp, Glycine max
  Clone ID: 700556668H1
atcaaagatctctttaacccagaccgtgttcttattggaggcagggaaaccccagagggccaaaaagctattcaagcattgaaggatgtttatgctcaatgggtccccgaagaaagaatactaaccacaaatctctggtcggagaactatctaagcttgcagctaatgccttcttggcccaaaggatttcatctgtcaatgccatgtcagcactttgtgaggctaccggggcaaatgttcaacaggtgtcctattctgttggaacagactcaaggattgg

SEQ ID NO: 2661 - DNA, 276 bp, Glycine max
  unsure (1)..(276): unsure at all n locations; Clone ID: 700556669H1
gtttcacttgtccgtgatcacaacatcaaaganaagctagtggaacaaggcatatctgttcaaagctacaatggagatctgttgtatgagccatgggaagtaaatagtgagagtggacgtgcttttactaccttcaatgcttttggaagaaatgcttgcacatgcaaatggatattgtttcagttgttcctccatggcaattaattccagctgaaggaaaaattgaggaatgttcattggaggaactggtcttgaaaagaatcagaaaaaccagta

SEQ ID NO: 2662 - DNA, 269 bp, Glycine max
  unsure (1)..(269): unsure at all n locations; Clone ID: 700556670H1
gtcttgctcgatcaatgccaacaagcggtgctctggaccgtgttgctaaaaaattgaacctccctttctttgaggtccccactggttggaaattttntgggaatcttatggatgctgggaatttgtccgttgcggggaagagagttttggaacaggttctgatcacattcgtgagaaagatggcatctgggctgtcttagcttggctttctattattgcacatcgcaacaaagacaagaatcccggggagaaattgatctccgtatctg

SEQ ID NO: 2663 - DNA, 253 bp, Glycine max
  unsure (1)..(253): unsure at all n locations; Clone ID: 700556671H1
gaagatggcttcacgcangctcgtatcttctctgattcgatcctcccttgcgtagatctcaatcgaagccctcaatttccgcatcganatcnnnaancacgtcatcnaancgtgcctcaccgcacggatacttgctgaaccgcgtcgccgagtacgccaccgccgcggctgatgctaccannnnnnnnnnnnnnnnnnnnnnggggaagaaggagctcggcggcggcgggaagatcaccgatgaattcacggg

SEQ ID NO: 2664 - DNA, 279 bp, Glycine max
  Clone ID: 700556672H1
ggaaaatttgttgatgacgaacctactactggaggtgttattcctccaggcaaaggcttcagggaagctcttggtcttggttcaggtcctttatttggattcacgaaagcaaacgagctatttgtgggaagattggctcaatgggtttcgttttctcattgattggagaaattataaccggaaagggagcactagcccaactcaacattgagactggggtaccaatcaacgaaatcgagcccctagtgttgttcaatgttcttttcttcttcattgctg

SEQ ID NO: 2665 - DNA, 276 bp, Glycine max
  Clone ID: 700556673H1
gaggccgccgccgtcgtggaggacgtcaagaacaaccccgacgccgccgtctccggcaccgtcatccgccgccgcctccagctcatgatgtacaacaacatgtaccgcatcatgttcgaccggaggttcgagagcgaggggatccgatcttccagaggcttagggccttgaacggagagaggagtcgcttggcgcagagctttgagtataactatggcgattttattcccatcttgagaccctttttgaagggttacttgaagatttgtaaggagg

SEQ ID NO: 2666 - DNA, 280 bp, Glycine max
  unsure (1)..(280): unsure at all n locations; Clone ID: 700556674H1
aaaaaccatggcatcttcaccggacaccagcaaaaccataaagctgatgcgttacaacagctacctccgcagactcaacagcttcaaactccttaagacatcnnnnnnnnnnnnnnnnnnnnnntacacactctccacccccacctcctcctctcctccgccttccacggccccgcatgggagaatcaggtccgccactccgccctcccccgcnncnccccacggcatgtcggtgctggtcaccggcgcggcgggcttcgttggctcccactgctccctc

SEQ ID NO: 2667 - DNA, 256 bp, Glycine max
  unsure (1)..(256): unsure at all n locations; Clone ID: 700556675H1
ctctctcttctctctctgcgtttcactgcagaaccaaaacaagctccggagaaaccgcaacaaaaaaagaaaaaaacacacaaacttaacccaaaactgtaaccccagtatgccatgctcacaccacaccattctcttctcctcctccttctctctatnntcttcttctctctctccgtcaccgctgcaagaacctcttctttccattccttacgtattcaagatggaattgagggtggtggcgagggagagcata

SEQ ID NO: 2668 - DNA, 277 bp, Glycine max
  Clone ID: 700556676H1
ctaaatcagacttccgggagccggtgaatattggaagtgatgaaatggtcagcatgaatgagatggctgagattgttcttagctttgaggataagaatataccaatataccatattcctggcccagaaggtgttcggggcgtaattcagacaatacattaatcaaagagaaacttggctgggctccaactatgaagttgaaggatgggctgagaattacatacttttggatcaaagagcagcttgagaaagagaaggcagaaggtgttgatttatca

SEQ ID NO: 2669 - DNA, 264 bp, Glycine max
  unsure (1)..(264): unsure at all n locations; Clone ID: 700556677H1
ganaaaaaaaaataaaagagaagaacatggcctcatctagangactactaactctccctgtgactgcctgcaagttcttgagaagaaaatgcatgccggattgcattttctccccgtatttcccccagaagagcctcagaagttcgccaatgtgcacaagatatttggagcaagcaacgtgagcaagcttctaaatgaggtgcagccccaccagagggaggatgcagtgaactcactggcctatgaagccgaggcacggntaaa

SEQ ID NO: 2670 - DNA, 282 bp, Glycine max
  unsure (1)..(282): unsure at all n locations; Clone ID: 700556678H1
aacagtctcaacaataacaacagcaacaacaagagaaagcgtaacaacagaaaagaagaaggtagtggtggaggtgcagaacaaaaagggcnnnnnnnnnnnnnnnnnnncgagaacagtgaaagtaacttgaaggacttactgcttcgctgattatgttagacgaggaagaaattcaagaggaacggaacagaaaagttgagtacgaacagcatcgcaacatgtacaacgccaacttcgagaaccagacccgggccatgaacacctacaaggcccattcga

SEQ ID NO: 2671 - DNA, 282 bp, Glycine max
  unsure (1)..(282): unsure at all n locations; Clone ID: 700556679H1
gcgttgccattctcatcctcttctttctctctctaccattgccatggatccctacaagcaccggccatccagcgccttcaattctcccttctggactacaaattctggtgctcctatttggaacaacaactcctctttaaccgtggagctagaggtccaattctgctggaggattatcatcttgtggagaagcttgcaaattttgatagggaacgtatcccagaacgtgttgtccatgccagggcgctagtgcaaagggtttctttganggtcacccatgac

SEQ ID NO: 2672 - DNA, 284 bp, Glycine max
  Clone ID: 700556680H1
agcgttgccattctcatcctcttctttctctctctaccattgccatggatccctacaagcaccggccatccagcgccttcaattctcccttctggactacaaattctggtgctcctatttggaacaacaactcctctttaaccgtggagctagaggtccaattctgctggaggattatcatcttgtggagaagcttgcaaattttgatagggaagtatcccagaacgtgttgtccatgccaagggcgctagtgcaaagggttcttgaggtcaaccatgacattc

SEQ ID NO: 2673 - DNA, 283 bp, Glycine max
  Clone ID: 700556681H1
caaaggttgctgtaggagataagattgcagtagtgctaagtgctaacacctgcagtgaacaatggcctctgcatcagcatctctgctcaagtcttcacttgttcttgacaagtctgagtgggtgaagggacaaacccttcgcaaccttctgcatcagttgtgagatgcaaccccaccaccccatcaggcctcaccatcagagctggttcctatgctgatgagctcgttaagaccgcgaaaacagtggcttcaccagggaggggtattttggccatggatgagt

SEQ ID NO: 2674 - DNA, 278 bp, Glycine max
  Clone ID: 700556683H1
cacactaacaccaccacttcatcaactttacttgacaacaatattgtaaaactcaaaatctagtttcatactttttttcttcttcttgaaatggctctccaggctgcttctcttgttcctgcttctttctcggttcttaagagggaaagagtggtgtgtctctcaaggactccaccttgttcggtctttcattttcagaacctatcaaagctaacttcagctcttctgcattgaggtgcaagagggaattcgaacaaaagctctgtgctgtgagggcc

SEQ ID NO: 2675 - DNA, 271 bp, Glycine max
  unsure (1)..(271): unsure at all n locations; Clone ID: 700556684H1
cccgcattccntancctcgaagactattcttccttcttcttccctgacatggatcccattcccaattccaatgtcaacaagcgtcgtgcaaacaacgaccagttcgacttaaatgactccgcattcagccactcctcaattccatcatggatcctaaccatttccaacaccaatccaaaccaatccanttcgantcctccccgaccaagagagctcgccgtganctcntcgttctcgaagacagccacctcaaccccgcctcggccccgga

SEQ ID NO: 2676 - DNA, 279 bp, Glycine max
  unsure (1)..(279): unsure at all n locations; Clone ID: 700556685H1
aaaagtaggcttgaaaatcttccggacaatgtggtcgtnataggttcacacactcacactgacagtcgaaaggagaagttcacatcctgggggtttgctttttacaaagttcggaagtaatcagactgctcttcttgattggctttcccggatagttttggaagattgcatgacaggggaaaggaggccccaaagccaaacaaaaccttgaactaagcttttcccaaataaagtgacaattcacatgccacaggatgagacacttctagcatcttggaa

SEQ ID NO: 2677 - DNA, 277 bp, Glycine max
  unsure (1)..(277): unsure at all n locations; Clone ID: 700556686H1
ttctcctcagaatctgaaagaacattcctatttcctanacaacactannnnncctggtggaagaatctcttcactctccatgcaacaacgttggctntgtctccttatnctctctctttgttagcctctgtctccccaaaatgcacaccctnctttctttctcctcatcacactctccacatcttccaaaccacaacatannacanatccaataataaactctctcattccatcaatggactttcatcatgcncttcttctcctttgctccccagtg

SEQ ID NO: 2678 - DNA, 277 bp, Glycine max
  Clone ID: 700556687H1
cattgttccagatcaagtatttttgatgcaaaggctggaattgcattgaataagaactttgtgaagcttgtcctcttggtatgacaacgagtggggatacaggtaatccacctttaaccttttcttgtatgtgatagtggttagtgcgccaataagttgttaattagttcaaaaatctaatcacgcgaattttagatgctatattatgtattcagcttgatctaatactaataccctatgtgtgcctggttctgcagctcacgtgtcattgacctgc

SEQ ID NO: 2679 - DNA, 277 bp, Glycine max
  Clone ID: 700556688H1
agcaacaataacaatggcagcctcactacaagctgcagctaccttcatgcaacccaccaaggtgggcatggccactcgcaacctcaaatctacacaatgcatttctaaggcttttggcttggaacccgctgcagctaaatcatttgctcccttaagcccgatctcaaagattttgctcaaaaatgtgtcgacgccaccaaaattgcaggattcgcccttgccacctcagctctcgttgtttctggagcgagtgcagaaggtgttccaaagaggctaa

SEQ ID NO: 2680 - DNA, 275 bp, Glycine max
  unsure (1)..(275): unsure at all n locations; Clone ID: 700556689H1
ccaagctgcacaaattaatatccaacactctcaagctttccactttcaaactctgctcgctcaatttgctttatctttccgaggtaatttcttttactttctttctgaactcaaataaatttctaatgaataccccatcctctcatatctctatgtatctgttttccctttctttgcattccatcttccaacgtcggngcttgtctgaattaaacatatttctctgtatctgttttctgtctttttcttttttaatattcctgtttgtgttaatt

SEQ ID NO: 2681 - DNA, 273 bp, Glycine max
  Clone ID: 700556690H1
aattaacgtcgtaaacgacgtcgcaaaagagatgataaagcagagaagagaaatggggttcaagacgcggaacgaccttctctcgcggttcatgggatcaatagacgacgacgtttatttaagagacattgtggtgagtttctattagcgggtcgtgacaccatcgctgccgggttaacgggcttttttatgttgttatcgaaaagcccggaggtggaggagttgattagggaggaggtgggccgggtgatgggcccgggccaggagtttcct

SEQ ID NO: 2682 - DNA, 274 bp, Glycine max
  Clone ID: 700556691H1
ctctgtatctgtctttgtctctgttcgtctcgctgaaggaatcgctaaggatcacattctttgcaggtttagtttctgcttctgggccacctctcaagttctctgctttttttagggttcctttgattctgaattggatgcaattgggtgcctcactctgctttgctccattgctgccactctatccgttcatgagaatagcagaacttttgacctgaccagtgaactgccagggcaaacgacaaggtgtagtactcaggacatgggttgcttc

SEQ ID NO: 2683 - DNA, 276 bp, Glycine max
  Clone ID: 700556692H1
ctctgttggaactgatgccaagggaaacattaatatagaagagctgaggaaggctgctgaaacacacaaggataacttatctgcacttatggtaacatatccttcaacccacggtgtttatgaggaaggtattgacgaatttgcaatattattcatgataatggaggccaagtatatatggatggtgccaacatgaatgctcaggtgggactcacaagcccgggttggataggagcagatgtttgccatctcaatctccacaagacattttgcatc

SEQ ID NO: 2684 - DNA, 276 bp, Glycine max
  unsure (1)..(276): unsure at all n locations; Clone ID: 700556693H1
ttcaccttctcaatctgtttctctgctttactaatttgtcccaaatcagaaccagattgagcttctgcacaaccagaccagagattcaacgcagaaactgtgcttatccctggtccataggatctgatttggttcataaagagtagtacacgtttcattgctcgaaatagagttgaaaaatctggagtttccatgtctgagaaaccatcttcatcgttgacatctaccgtagctgcncgagaagttgatccctgttgcaggtttgaatgaaaaaaa

SEQ ID NO: 2685 - DNA, 280 bp, Glycine max
  unsure (1)..(280): unsure at all n locations; Clone ID: 700556694H1
ctccgccttggccaaatccctagcctcttgntgtttgattgagatgacgatggcgttgttagcgggtcagagctccatttccgcgcttccctttgttaacccaacttccttgagcttcaaacctctcgcctttaccaaatcctagctctcccttcagcacagaggccaacttcgctgaggctgaaatgcaagatggagagcnanggctacattctgcngggnaacactcgcacggngacgacgctgatgggactcgccgtgttgctgntgaagnaggcgg

SEQ ID NO: 2686 - DNA, 284 bp, Glycine max
  unsure (1)..(284): unsure at all n locations; Clone ID: 700556695H1
gttgatcgagataactagaaacagtgtgatgaaaatgaaggtccttgttttcttcgttgctacaattttggtagcatggcaatgccatgcgtacgatatgttccctctccgaatgaacactgncctatggtgcccgtactccgaggtgaaatgcgcaagttggaggcttgctgtggaagcacacaacatctttggctttgagaccattcctgaagagtgcgttgaagcaacaaaggaatacatccatggcgaacaatatagatcagactccaaaacagttaacc

SEQ ID NO: 2687 - DNA, 288 bp, Glycine max
  unsure (1)..(288): unsure at all n locations; Clone ID: 700556696H1
gtctatttcacacgcaccttcacttccacatttgtagcttatntctcctcacttaagcaccctcttatttggcatatcagtagctcactttggcttgttgagagcaattcagcaaccacaggccttagctgcaactaaaagtagagagcaattccattgccgttgcttgttattagttcattttcacaaaatggaagagagcaccaagaggaaatacactaatctgatccatgaactaatccaaggaaaggaactaacaaagcagctcagtgaccatctggtttcatc

SEQ ID NO: 2688 - DNA, 295 bp, Glycine max
  Clone ID: 700556701H1
tctctcctccaatggccgaccagctcaccgacgaccagatcgccgagttcaaggaggccttcagcctcttcgacaaggacggcgatggttgcattactaccaaggaacttgggactgttatgaggtcacttggtcaaaacccaactgaggcagaactgcaggatatgataaacgaggttgatgctgatggcaacggaaccatcgatttcccagagttcctcaacctgatggctcgcaagatgaaagacaccgactcagaggaggagcttaaggaggctttccgtgtgtttgacaa

SEQ ID NO: 2689 - DNA, 291 bp, Glycine max
  unsure (1)..(291): unsure at all n locations; Clone ID: 700556702H1
atttcggaattcggaaaacccagtgctgatcgctctctgggtgttcccaaaatgaagcttcggagatcttcgctgtgcgtctttctanggtttctggcgctgttcctttcgccgccgccgtcaatggcgaaattcgtngtggagaagaacagcttgacggtgacgtcgccggacaacatcaagggcacgcacganagcncgattgggaacttcgggataccccaatacggaggcagcatggctgagaacgtgttgtacccaaaggncaacaaaaagggntgcnaggagttc

SEQ ID NO: 2690 - DNA, 288 bp, Glycine max
  unsure (1)..(288): unsure at all n locations; Clone ID: 700556703H1
gagtttgttgtgagctataagctagtttatcgtgaggagaatatgaagttgtttgttttctttgttgctgcagtagttttggtagcatgcccatgccatggcgcaggctaccaaaggttccctctccgaatgaaaactggctatggtgagcgttcttcggaggtaaaatgcgcnagtttnaggcttgctgtggaagcacacaacatccgagcctttaaaaccattcctgaagagtgcgntgaaccaacaaaggactacattaatggcgaacaatttagatcagactct

SEQ ID NO: 2691 - DNA, 263 bp, Glycine max
  unsure (1)..(263): unsure at all n locations; Clone ID: 700556704H1
tgcattcacgggtcagaagcgtcgccggaaacatcanatgcgcancgangactcttctgtncatcttcgacgaccacgccgccggctgcgccgttgcagttcccgcagactctggcggngctccgggcgcggctggcggangagtcgccgtcgctgtaggacttcctcgcgttaaaatcggagagcgcgtactcggtggaggtcgggactaagaagaagccgcttccgaagccgaagtggatgaaggaggccgttcccggcgg

SEQ ID NO: 2692 - DNA, 276 bp, Glycine max
  unsure (1)..(276): unsure at all n locations; Clone ID: 700556705H1
gttttgtcccagttgcattggtggagggtgacgatgacgacgatgacgnnggttatgactacgctcccgcagcataaactataaatgtttggttaccttgnatactatccaacttgtagtgaccgacatattagaatgtctgcttctattcttaatttttagtttggcgccaattgaaagcgattaagctacaaaattatgtgcgaggtgactttatgttgatgtgtaggcatgcactatcaattatttagcagctaggtttgttatccagagtga

SEQ ID NO: 2693 - DNA, 285 bp, Glycine max
  unsure (1)..(285): unsure at all n locations; Clone ID: 700556706H1
agatgccgcagaggcactcgaagaacaacaacgatcttgcgtnctncacgtacgatgagaagcgaaaactaggttatgggacccacaaggagaggttnggcaaggactccannaagcccttcgatgcttgctctctctgcctcaaatccctaattgatcctatgagctgccagaaaggccatctctnttgcaaagagtgcattcntcagtgcctcttgtctcagaagaaagacattcaaaggaagcttgcagnccatgctgctcagcagaagcaagaaaaagagg

SEQ ID NO: 2694 - DNA, 284 bp, Glycine max
  unsure (1)..(284): unsure at all n locations; Clone ID: 700556707H1
cgttgccattctcatcctcttctttctctctctaccattgccatggatccctacaagcaccggccatccagcgccttcaattcncccttctggantacaaattctggtgctcctatttggaacaacaactcctctttaaccgttggagctagaggtccaattctgctggaggattatcatcttgtggagangcttgcnaattttgatagggaacgtatcccagnacgtgtngtccatgccaggggcgctagtgcaaagggtttctntgaggtcacccatgacat

SEQ ID NO: 2695 - DNA, 284 bp, Glycine max
  unsure (1)..(284): unsure at all n locations; Clone ID: 700556708H1
cctaacaaaaccccactctcattcatcganggggaagaagaaggatagaatcgttcttccaccggagcttccgccggagattcccgacgaggaagtttaagtttccgacgatgacctccaattcgtcaaggagaaccgcgcctatgcctccttgctttccaccttggacacccgtncaatcaccaagcatgttacacgggttgctgatgccaaagacgatgcattggagaaactttatgagaaacgcatgcaaaagaatgctctcaaganagaaaaagaagaaa

SEQ ID NO: 2696 - DNA, 254 bp, Glycine max
  unsure (1)..(254): unsure at all n locations; Clone ID: 700556710H1
tctctcagttcctcaatgattcacgggntgattcttcttttttgtgatcggcagaaataagagcaccaaaccagtatgcactagaccaaagtgaattactgcaagctcaaacagtcaaccccactcattctccttctattagtgtgggacagaatagtaaacgaaagaagagctannnnnctggatttgtcaagagtataggttttctccattcctatattagcaatggttgcagaatcatggtttcgtagtct

SEQ ID NO: 2697 - DNA, 281 bp, Glycine max
  unsure (1)..(281): unsure at all n locations; Clone ID: 700556711H1
cgaaattaataaaggaactttaactttcgcgagcnacacaaacgcaatcaaatcaaatcatagattgatttggcaaccccaattcccttttgattatntttntttttatgaattaaagcaatgggtttggttgcttagtgtttttttggacgcacgaaagatgattcctnanggtggcctcagttgctgtttgagtgctgctgcncnntaccttctcggcagaagcagtggcagggatgcggaaattcttaaatccgttacaagggtcaatcagctgaagg

SEQ ID NO: 2698 - DNA, 282 bp, Glycine max
  unsure (1)..(282): unsure at all n locations; Clone ID: 700556712H1
ccgaccaatggccaccattgcttcttcctcatccactgtgctcttctctgcatcctcttccaacctcctcccattttcacacccttctacttcgcgcctttctttctcttcttcccttcactcctcatccttctctctatcaatttctccttcctttttgtcatacnantcttcaagttcnacacacttngccactcatgctgccttcagcatcagtgccagtgccgccgagaagaagaaggtgctcatcgtgaataccaacagcggcgggcatgccatcat

SEQ ID NO: 2699 - DNA, 281 bp, Glycine max
  Clone ID: 700556714H1
tgaattactgaactgcgagctccctccaattcgcttctccttcttcttcattccttggcagtacacaaatctgtcatatcttgctgctcgatcgttacgatgatggcgctcaattcattgtcaccactttcaattaattctcttcacgtatcttcaagctcaacttcaaagatttcgcattctcattccaagtcctttcccgtcgttgtgtgccaaattaactcaaacagagatcatcgtcaagaatccacaaaatggggaaaagtggtttcggccacgtt

SEQ ID NO: 2700 - DNA, 283 bp, Glycine max
  Clone ID: 700556715H1
gagacagcaaattggggtcttgatgttaatgaacttcgtcaatcagttgaacaggctcgctttaaaggaataactgttaaagcaatggtgatcataaatcctggaaaccctactggtcaatgccttagtgaagctaatctaagagaggttttgcaattctgctatcaagaaaatttagccttgcttggagatgaggtttaccagacgaatatatatcaggatgaacgacccttcatcagttctagaaaggttttgatggaattggggccacctataagcaagg

SEQ ID NO: 2701 - DNA, 236 bp, Glycine max
  unsure (1)..(236): unsure at all n locations; Clone ID: 700556716H1
attttatntcaaatcgttgcgatgctggttgcgacagattctcctnttttttnnaataanacactngaaacaagaacaatcatggaatgaaattaactctacaaaatttctatagtggatgtgnagtctacttttatacaaatcatcnaacactaattaacatgngcaggnctcaaagtaatagttttctacaaaaaaattgaagtttggggggggatctacatctctatgggatt

SEQ ID NO: 2702 - DNA, 291 bp, Glycine max
  unsure (1)..(291): unsure at all n locations; Clone ID: 700556717H1
aatttttctctcaaccggcccaatttagcataagcccagcatggccaccgcaacagcagcagccacctcgtccttcatggggacgcgcctcctggaggcccactccggggcggggcgggtgcaggcccggttcgggtttggcaagaagaaagccgccgccccgaagaaagtttccagggggtcgggctctagctccgatagncccctgtggtatccgggcgccaaggcgcccgagtacctggatnggagccttgtcggagactacggattcgacccatttgggctaaggaa

SEQ ID NO: 2703 - DNA, 287 bp, Glycine max
  Clone ID: 700556718H1
ataatagtagcttgctcagcagggggtacaatgaaaccgtcacaaaatctacccgaaggtcaacaatcaaggtattgattattttgaatttcttgtggctaattgcctatttgcttctttggatttttaattttgcacatagaatttcatacatgcaataagattatggtccgaaattggttgaagagattttatgaaatttattaattttgcatggcaattctgaggtaatccttttagatgtgtttgcactttgcatccaacctcggactcaagacattgaaaaa

SEQ ID NO: 2704 - DNA, 287 bp, Glycine max
  unsure (1)..(287): unsure at all n locations; Clone ID: 700556719H1
gaatggctccatcgtggcattccacactccaataaagtnccacatccaagatggcttaccaccatcatgaccacaccaaccggaaatcccttttggacaccctatactgctccgangcagaggaggactacggtcatttcctaaacaactcctcccctgcgtcccctcctttcttgctccaaagcgacatgttttcggacgaacaagagttgacatcgctgctggggaaagaacaccacaaccctctaagcacctgtctccaaaccaaccctgccttggactttgct

SEQ ID NO: 2705 - DNA, 276 bp, Glycine max
  unsure (1)..(276): unsure at all n locations; Clone ID: 700556720H1
attgttctcttcattacccacacacacaaaagaaacaacactccaagaggaccaccaggtcctccacctcttcctctcatcggcaaccttcaccaactccacaactcatccccacatctcngcctatggcaactcgccaaactccacggtcctctcatgtcgtttcgcctcggcgccgtgcaaaccgtcgtggtttcatcggccagaatcgccgaacaaatcttgaaaacccacgacctcaacttcgcttccaggcctctcttcgtgggcccgaga

SEQ ID NO: 2706 - DNA, 274 bp, Glycine max
  Clone ID: 700556721H1
ttttcatagcattttcagaggaaaatggcgggtacggtttcgacttgttacttcttcgtgtttcttctttctctccttcttccttttcagatctccgctgaggaatcctcggagaaggagttcgtactcacattggatcactctaactttcacgacactgtcagcaagcacgatttcatcgtcgtcgagttctacgccccatggtgtggtcactgtaagaagcttgctccggagtatgagaaagctgcttctatcttgagtagtcatgatcctc

SEQ ID NO: 2707 - DNA, 280 bp, Glycine max
  unsure (1)..(280): unsure at all n locations; Clone ID: 700556722H1
aatgagggtgttgaatttggccagtacctttangagatttacaatcatgatgtggagctaagagtctctaaagctggagtnaacctactactgactangtggangaaagagctcgagaagattttttatgggaacattgtngcttangatacngccatacttccagaagctaaaccgggtgattttnctaatgtnatanggaggaatatatnctctgaaganggttcttcaacaccagangctgcngcatctcaatcagtacaggngatggccagatatg

SEQ ID NO: 2708 - DNA, 280 bp, Glycine max
  unsure (1)..(280): unsure at all n locations; Clone ID: 700556723H1
ctctctcctcagcgcgcgctcttttctcttctctctctctctatatcacagatctcgctctcccnaacgattcacctccgaaatntctcgcttttgttccgttcaaggttcaattttncagaactccctttaacccctttccccctctttcttccttcttttaattatntntttaaaaatattttgtttatgggtttttaatttgtaaaatcggacacgatcgctgttcgataatntcgattctctccacacnatggcantctctntccttagcnaccta

SEQ ID NO: 2709 - DNA, 281 bp, Glycine max
  Clone ID: 700556724H1
atcaagaagaagtaggaactgatcccaatgggacagaatttgtcatagctacaaaggattcaccagaactggatgcatccactctggtaattggaagagtaataggagggatggaggttgtgcagaggatcggtctggttaaaactgtacaagagaatacaggatctccatactttagggtggcaaagctaataggagacaagagagctgttgtagcagaaagaggattcaaccgcccttattcaaaggtcattgttacaaactgcggtttaatggagtaa

SEQ ID NO: 2710 - DNA, 242 bp, Glycine max
  Clone ID: 700556725H1
tagtgtatgccactctggttaattatcatacccccttctaggcatagttcttctccctctgttctctattctacactgtgaaaccaagatgaaggtagcatttgtagctgttctacttatttgccttgtcctaagctcctccttgttcgaggtgtcaatggccggttctgctttctgctcctccaagtgcgcgaagaggtgttctagggctgggatgaaggacaggtgcacgaggttctgcg

SEQ ID NO: 2711 - DNA, 277 bp, Glycine max
  unsure (1)..(277): unsure at all n locations; Clone ID: 700556726H1
tcaatgcnagaattgganganntaatgtggagctcatcaatangctaccanactttgagggtgaaggttcancttatgttcataggggctgatctcaancatccagcttcccgggacatcaaangnccatcaattgctnctgtagttgccactnttaattggcctgcngcaaatcgctaagcagcacgngtatnngcncnangtnntcgngttnagaaaanntgacnttcgggagaattgctatgacnntnattcgtattacgatnggctgaacaca

SEQ ID NO: 2712 - DNA, 269 bp, Glycine max
  Clone ID: 700556728H1
atgctgtctaacggttcttatgtatggagtaagaagtattcattcaaggcatccccatatcctggacagaactctttgcaacgtgttatcatatttggtgacatgggaaaggctgagcgtgatggttcaaatgaatatgctgattatcaaccgggttctctaaacaccacagaccaactcgtcaaggatttagaaaattatgacattgttttccacataggagacatgccttatgcaaatggatacatctcacaatgggaccaattcac

SEQ ID NO: 2713 - DNA, 278 bp, Glycine max
  unsure (1)..(278): unsure at all n locations; Clone ID: 700556729H1
tctcgtgtagaataatcaatggaagtaggaatgtctctgaacgcgctggttcgtcttcctctctcgaattcacgcttccacgacgatgctgctccgatgattattaggcactctctgttttcgagccgaannnnnnnnnnnnnnnnnnnnagttataaggttccacagcgtcatcaagtgttcgtggttgaagccaagggcaaaaagggaatgatgtctcgtcaatttcagcgcaatgctcctcctcctttacccaagattgaagacgatggcaatcc

SEQ ID NO: 2714 - DNA, 282 bp, Glycine max
  unsure (1)..(282): unsure at all n locations; Clone ID: 700556730H1
ctcaatttttctctcaaccggcccaatttagcataagcccagcatggccaccgcaacagcagcagccacctncgtccttcatggggacgcgcctcctggaggcccactccggggcggggcgggtgcaggcccggttcgggtttggcaagaagaaagccgccgccccgaagaaagtttccagggggtcgggctctagctccgataggcccctgtggtatccgggcgccaaggcgcccgagtacctggatgggagccttgtcggagactacggattcgacccat

SEQ ID NO: 2715 - DNA, 282 bp, Glycine max
  Clone ID: 700556731H1
ctcagcttttgggtttgactcatcagctgctgtggcaactgcagtgatgaattctaggtctgctgccttcgcaaagcgaagccaaagtttcattgatcgtggagctgcaacccaccatcttgggctgtcttcagcttccaactcttcttgcagggtatcctctaccctttcagattggagttcccctaccgggaaactggattggggtgtaaacggagacaagctgaacaagctgaggaaatctacttcctttggattcagaaacagtggggtaatgcatcc

SEQ ID NO: 2716 - DNA, 284 bp, Glycine max
  unsure (1)..(284): unsure at all n locations; Clone ID: 700556732H1
acgagnnnnnatgtcgtcnacggtgctggaggtgacgcgggcggcacacgaggnagtggagcggttggngcggctgatagtgaangagctccagaatgaccctgcctccaacaaagagcgcttgtatcanagtcaccgtgtgcgaaacatgatcgacaccattacttccaccactgaaaagcttnttggggtatatgaagataacgacaatgcanggnaggacgagattgctgcactcggntgccaaaccgccactggaattnacgtgttagngcctnttatga

SEQ ID NO: 2717 - DNA, 280 bp, Glycine max
  unsure (1)..(280): unsure at all n locations; Clone ID: 700556733H1
ttggtttgtntggggtcctgtggctgcacatatccaaccttaacttcggacgtcgaatctttgctggtcattngttgtttttaattctttcanaaatttcnaaacacnacccaaaatctctngggaatngccagnttcagtgntactcctaggcagcagatttngggttcttctgacccaanatncannttncccaantggnctgttgaatttttatnggggttntanattccntgccngtngattttaangtcatanccngggtccccttctggataca

SEQ ID NO: 2718 - DNA, 287 bp, Glycine max
  unsure (1)..(287): unsure at all n locations; Clone ID: 700556734H1
ctcactcacacacntacacactctcnttccatgggtncgtttcggaaaccctnccttgcatntctctgcggttgttctatttctnggtctctatgnggcagcngcagaacagagtnacactcacaagagtncttacattgtanacgtggcganancgnanatgcncgagagcttngagnannacgcatgtggtgagtcgtcantgannagcgtgtctanantcngcgnagatgatttacacctacgacaagncatccacggctacgngacgagattnaacgctgagg

SEQ ID NO: 2719 - DNA, 286 bp, Glycine max
  unsure (1)..(286): unsure at all n locations; Clone ID: 700556735H1
gagntacaagtatgcnaactantctaaccgaanatatgcagagaccgggaaagctattttgaagtnccagttgatcaatcaacgtgcnaantnactcatttncactattntcaggtggnttatccgatcctagacttgtngcaatttcgaattccanatcatttncanatccnanagcacctntgtatccgcgccttgctctaggaaaatcttgggatgaaatgacagttacatgnganaagtggatatggactaaatgangctgtgccttttnttgngtggggac

SEQ ID NO: 2720 - DNA, 283 bp, Glycine max
  unsure (1)..(283): unsure at all n locations; Clone ID: 700556736H1
ttccttccctccaaaatggaagagaaactaaagtacccctgtctctcttccttgtnaaccctcttcctctgcatctccgccacttccactaacccacacaactcccaaacncaaacccttctcctccataccctccctgacccacccacactctcatggcccgaatccgccaccgtagaacccgacccggaacccaccacatccctctccctnnaccacatagacgcactctccttcaacaaaaccccttcccaactcttccacctgagactcgaacgcgatg

SEQ ID NO: 2721 - DNA, 240 bp, Glycine max
  unsure (1)..(240): unsure at all n locations; Clone ID: 700556738H1
actgcttctctttttcttcngctttctacaactggaggctattttggaccctgctgatttcctcgctctgcaaaacattcgtaaagctctgcaagacatgcctgcttccgatttcttctcttcctgggatttcaccgcagacccatgcaacttcgccggcgtttactgcgactccgacaaggtcatcgcgctcaacctcggcgaccccagggctggctctcccggcctcaccggccgcct

SEQ ID NO: 2722 - DNA, 278 bp, Glycine max
  Clone ID: 700556740H1
tgatgaatgatcatccagttgatggtgccgctttaagttcataccaaatttagtatggagatgcccacacaggtaagctgatatggaatgctttaggaaaacatcttccaatgtccttccagaactagagggtgcagaaaatgagagtggaaaatgcccaaaggaaattttggtgagtagtgacagtgatggaagataggaggaacctgtgaggtcgccggtgatgaggacgagggaagggttgataacggaaagagcggggcccacaagattggcga

SEQ ID NO: 2723 - DNA, 271 bp, Glycine max
  unsure (1)..(271): unsure at all n locations; Clone ID: 700556741H1
cgctattaagaagtatttgttttctgatgcgaaaccgacggtgaagatttngtttgaaggcacaaagttggggattcagccatctcctgtggtggcagcgtttagctctagaggacccaactcgatcaccccgcagatccttaagccagatcttatcgcgccaggtgtcaacatcctagccgggtggtccaaggcggtgggacccaccgggttaattngttgataacaggcgcgtggatttcaacatcatttctggcacgtccatgtcgtg

SEQ ID NO: 2724 - DNA, 277 bp, Glycine max
  Clone ID: 700556742H1
attaagttcattttcctccctttcactctcgtagacatcacaaaccttccctccattcatcccacgcatggctgccatgaactctagcgtattggcctgtagctatgccatatcaggtgcagcgtgttcggagctcaatgggaaggtcacttccgtggcctatgttgcatgctctggctacaagttgccattgatcaaagctgaggccagagttcctaaagccaaagaatctgaaggaggaaggagaggtgcccttgttctcttggcagctaccctt

SEQ ID NO: 2725 - DNA, 274 bp, Glycine max
  Clone ID: 700556744H1
ccagccatgtcgatcttttctattccctcaccaacgtaccgttgttcaatttcaatttcaatttctcggcagccattgccatgttctttcacggctcaagtgagaagaagagggaaagggaaagtggtaatgagcatggaggcaggcattggagtgatgggcaccaagttgggtatgatgagctatttcgaatccgacggagaggttgttcctgtcactgtcgtgggtttcaaagaaggcaacatcgtcacccagatcaaaactgaggccaccg

SEQ ID NO: 2726 - DNA, 203 bp, Glycine max
  Clone ID: 700556745H1
gagtgggttgggttgcgtgccccgttccgttcgttcttcccctttcctttcaattctttcttttcaattctttttcttctgaacacagaaaaaacagaagatgggaatgaaacaagtcattaaaaacctcgacgcctttcctcgcgccgaggatcacttgttgcagaaaacccaatctggggctctcgtatccgtaattggtc

SEQ ID NO: 2727 - DNA, 278 bp, Glycine max
  Clone ID: 700556746H1
caacaacaataacaatggctgcctcactacaagctgcagctaccttcatgcaacccaccaaggttggcatagcctctcgcaacctcaaatctacacaatgcatttctaaggcttttggcttggaacctgctgcagctaaactcacttgctcccttcagcctgatctcaaagaatttgctcaaaaatgtgtcgacgctaccaaaattgcaggattcgcccttgccacctctgctctcgttgtttctggagcaagtgcagaaggtgttccaaaaaggcta

SEQ ID NO: 2728 - DNA, 277 bp, Glycine max
  unsure (1)..(277): unsure at all n locations; Clone ID: 700556747H1
tagagcttcatagtttcttcttcntttctcaccttccttctctcccttcagacaaagggacaaaaaatcnnnnnnnnnnnnnnnnnnnnnnnnnttccaaaaccatgtcccacagtcatctaagtttcgcctttgggattctaggtaacattgcctccttcgtgtgctttctggcaccactaccaacattttatagagtttgtaagaagaaatcaaccgaaggttccaatcaattccatatgtggctgcactcttcagtgcaatgcttggatctttt

SEQ ID NO: 2729 - DNA, 280 bp, Glycine max
  Clone ID: 700556748H1
cctacgccttccttgcgtttaaactgtatttgctgcatcttttagttatttggtattgttattgttaccaatagcattttttgtgattgtcacaatgtctcgtatatgtagaagctattctctcatggaacttcttgattttgtggatgaccaattttagcttgaacttctttttttatggtttacttagatgaataattggagcttgggctttgtgaggactttgaatgaaacaattttgaaaaaagttaaacctttttgacatgtagagaattggtat

SEQ ID NO: 2730 - DNA, 283 bp, Glycine max
  Clone ID: 700556750H1
ggaaaacagaccgttttcagcttcaagcttcaatggagatgagatttctttgccgatggggcaccaggttagatcagaccccttgagaactgctcagagtaagctaacattttataagcttactcgatgtcagagtgaacatgtggtacatccttccaaacgtgtttggaatgatgatggttactgggtttaaggtttgatgattcttctcaatggttactgggtttaataaagtttgacaattcttgcgtttttataatgtacagtttcaaaatggcccgaa

SEQ ID NO: 2731 - DNA, 281 bp, Glycine max
  unsure (1)..(281): unsure at all n locations; Clone ID: 700556751H1
tcagtttctccaaacccaaactttcacgacaggnacctgtcanctttagttaaggtttttgcatcatcactgtgtgaagataatatagatatggaaatctcccatgacatcaagatcaaggatgacaagctaggtgatgtaaaggaagagaagattaaggcagaagcggaactgaagcataaatcagttgagaaagagcatacaaaaagtaaggnagagaagattaaggtagaagcggaactgaagantaaatcagttgagaaagagcatacaaaaagtat

SEQ ID NO: 2732 - DNA, 280 bp, Glycine max
  Clone ID: 700556752H1
gcgttaaagaagagagaagaaaaatgcgaaagttcgatccatggcccgttttcttcaagcgcgagtggaaacgcaactggcccttcctcgttggattcgcagtcaccggagctctaatcaccaaactttcccttggccttaccgaggaagatgctaagaattccaaattcgttaaggcgcacaaaaggtgatttctgaatcgtgacatctgcctggctttgcactttatgttaggtttgtcaagattactttgcttgtcttgattttatggattgtaata

SEQ ID NO: 2733 - DNA, 277 bp, Glycine max
  unsure (1)..(277): unsure at all n locations; Clone ID: 700556753H1
aaggatagagatcaggatagagatagagaccgttatagggatgatgggatgaaaganagggaccgtgaattccgagaaagggacaaatctactgcgattgccaacaaggatgtnttaggttctaagatgtctctatatcccagcaaggagaagtatttatccaaacctanaaatgagctggacctttctaactgcgaccagtgcactcctagttaccgtctcttaccgaaaaattacccaatacctgtagctagccagaaaacagaacttggtgctg

SEQ ID NO: 2734 - DNA, 277 bp, Glycine max
  unsure (1)..(277): unsure at all n locations; Clone ID: 700556754H1
gattgctagaatggaatttcgatgctcagtcatctcttttaccattctcttctctcttgctcttgcaggagagagccatgtccatgcatcgctacctgaggaagattattgggaagctgtttggccaaacactcccattcccactgcactgcgagagcttctaaagcctctccctgcangtgttgaaatcgatgaactccctaagcaaattgatgatacacagtacccaaaaacattcttctataaagaagaccttcatccaggcaaaacaatgaaa

SEQ ID NO: 2735 - DNA, 276 bp, Glycine max
  Clone ID: 700556756H1
tgtgactcttctctcctcacaatgctgcctcacaagcacactctggtggttgtggccactgtggccacactcgcgctggcggcggtgctcgcagcaccacaagcagatctggcctccgagcgagctgcattactctccctcggttcctccgtgggaggccgtaccctcttctggaacgccaccagggaaagcccctgcaactgggccggggtccaatgcgagcacggccacgtcgtcgagctccacctccccggcgtcgctctctccggcgaaatc

SEQ ID NO: 2736 - DNA, 275 bp, Glycine max
  unsure (1)..(275): unsure at all n locations; Clone ID: 700556757H1
cgaaacatggcaagagtggtggcactccaacagaaccaactatctttctctaccttagcttcctctctttctgacttcagtggaaccagacttcaaactcaacttcagttcaagagaaagcaatgccatccaaaagggtctttctacgtctccgcatcgagcaccaagaaaatcctaataatgggaggcaccaggtnnnnnatgtgtttttgtctaggctccttgtcaaagagggtcaccaggtgactttattcacaagaggtaaagcgcctgtc

SEQ ID NO: 2737 - DNA, 274 bp, Glycine max
  unsure (1)..(274): unsure at all n locations; Clone ID: 700556758H1
ccctctgttgctgcatccttaacaaggaaatacattatcaccattttttgcacttggcaaaatttgtaggcactcataatggtgaaatccataccattcagtggaactggcaagcacaaatacagttttcagaatattaaagttcctctactccctgtgcatttttgtgattgtgaggagcattgtagtccttttgtcccngaaagagaaaaactatctattgatagggcagctgatagtggtgcaatgaatgatgaagagattagcataatga

SEQ ID NO: 2738 - DNA, 274 bp, Glycine max
  Clone ID: 700556760H1
ctgtcttacaaggtttagtagtgactatggagcagagcattggtggacaatctagcatacaatgcatatttctacgcaaggactgcttctcctcaaagctcgcgtctcttccaacttctccttccgagatgccctttggtcacaaccgttggtttcgcaggttgtcggtttttccacgtttgcaactatgtcaagggctgagaaagggtttctccaaaaacatggcttgcagtgtcagtgtggataattgtgatacggttcatccagcaacaga

SEQ ID NO: 2739 - DNA, 275 bp, Glycine max
  Clone ID: 700556761H1
gtctggacggattcgtattgtcaaaattagaggaaggtctatgcagtgtgaagcttgtggagaaaatgcaacatttacccagcagcaattccgagaatttgattatgagaagttcactcagactcccttgcgtgtgcctcctttgaaattaaatctacttcccagtgaatcaagaatcagcagcaaggagtacagtgaagtaattcttaagaaggaaccacacgtgctggttgatgttagaccagctcaccatttcaagattgtatctctaccaa

SEQ ID NO: 2740 - DNA, 276 bp, Glycine max
  unsure (1)..(276): unsure at all n locations; Clone ID: 700556762H1
ccctttcattttctctgcatctgtactctccaaaatgccgtccttagaggaggagctcttcccttcaaccccangcaagttcaagatcgagcgggcccaccacatgaaccgccagctctaccgctgcttcgcctccaccagcaccatgttcctgtgggccctctttttaatcgccctcaccgcttcatatctcagcttccaaggcttcgttgattccggcagccgctacctctccgcctcctggggcgggatccagtgggagaagcaggtccgcac

SEQ ID NO: 2741 - DNA, 277 bp, Glycine max
  unsure (1)..(277): unsure at all n locations; Clone ID: 700556763H1
tttccgaangcttgtatctaggacacgaaggcnctcaatttctattcctatggcctccttggaatcatatgaganagaaactagtcttgtgggacatactggtccactttgtagtgtgaganaaaccccctttgtgcagatgagtggtccactgtatgctaccaatggaactggaaatcnttcacgacagaatanagttgcgacacgaaccaaagtagtggagagcaagacaggaaagttttcnactttcaatggcacagatgaanatcgttgggat

SEQ ID NO: 2742 - DNA, 282 bp, Glycine max
  unsure (1)..(282): unsure at all n locations; Clone ID: 700556765H1
aaagcagattaatacttttgcaaagaaggcaaatgatggatctttatcaattgatgagatggctggaggcactcttacaatatccaatggtggtgtttatggaagccttttgagtacccctattatcaaccctcctcagtctgcaatcttgggtatgcattccatagtgagccgtccaacggttgttggaggaaatattgncccaagaccaatgatgtacgtggctctaacatatgaccacagaattattgatggaagagaggccgtgttctttctgcgacg

SEQ ID NO: 2743 - DNA, 281 bp, Glycine max
  unsure (1)..(281): unsure at all n locations; Clone ID: 700556766H1
caaagctcatgacacgtttgacctacactcttgatgagattgagggaccctttgaggtgtcttctgatggcactgtgaagtttgaggagaaagatggaattgactatgcggccgtcacagtccagctaccgggaggcgaacgtgttccgttcctcttcaccatcaagcagttggtggcatcagggaagccagacagctttagtggagagtttctggtcccancataccgtggaagctctttcttggaccccaagggaagaggtgcctctacaggttatgac

SEQ ID NO: 2744 - DNA, 279 bp, Glycine max
  unsure (1)..(279): unsure at all n locations; Clone ID: 700556767H1
ctcgagtaccttgagtggcagaaagccatttattcagttggtgtatctgagatgaagagatggcctctgcaattgcggaaatctatgtctgnngggatgtctgcaactagtaatggntctnctttgcnacnatcagatattaggntgatccccgaaagaactcttccttcctcacctagtcctttgtacagccctcatantaaatccacnagtgttatgaaaggcagttnagggcaactactgcnagaaancagcttatgggtggacatnctatgggtg

SEQ ID NO: 2745 - DNA, 277 bp, Glycine max
  unsure (1)..(277): unsure at all n locations; Clone ID: 700556768H1
gctcattgaactctttgagtcatggatgtcaagacatggcaagatttaccaaagcattgaggagaagctgcacaggttcgatattttcaaggacaacctaaagcacattgatgagaganacaaggtggtcagcaactactggcttggcttgaatgagtttgctgatttgagccaccaagagttcaagaacaaatatctcgggcttaaggtagactactctagaaggagagagtcccctgaagaattcacttacaaagattttgaattgcctaagtca

SEQ ID NO: 2746 - DNA, 276 bp, Glycine max
  unsure (1)..(276): unsure at all n locations; Clone ID: 700556769H1
atttggagaagattgctgaaactgcaaaacgggttggaacaattgtgatctctgatgaagtttatggtcaccttgcatttgggagcaagccttttgtaccgatgggagtttttggctctactgttcctgttctcactcttggctcactttctaagagatggatagttcctgggtggaggcttggttggtttgtgacaaatgatccatctggcacttttagagaaccaaaggtagtcgagcgtatcaaaaagtattttgatcttctagnaggtccag

SEQ ID NO: 2747 - DNA, 276 bp, Glycine max
  Clone ID: 700556770H1
actcataacacaaagcacaaagcaaagctcatccttgagttaaaaaatggcagcagcttcttccatggctctctcatccccatccttggctggcaaggccgtgaagctgggcccatcagccccagaagtgggaagggtgagcatgaggaagaccgtcaccaagcaggtctcctcaggaagcccatggtacggcccagaccgagtcaagtacttgggcccattctctggcgagcccccgtcctacctaaccggtgagttcccaggcgactacggctg

SEQ ID NO: 2748 - DNA, 275 bp, Glycine max
  unsure (1)..(275): unsure at all n locations; Clone ID: 700556771H1
ggcgtgataggttcgaaatgttcaagggtttttgcgagantgtcgtcaacaagatgatggctcagcaagaagagattcacaacaggctcctcgaggacatgctcaaaagggaccaagagaagttcgccagagaggaggcgtggaagaagcaagagttggataggatgaacaaggagcttgagattatggcacaagagcaagccattgccgggggtagacatgccaccataattgaattcttaaagaaatgcgcaacaacaacaacttcattatca

SEQ ID NO: 2749 - DNA, 274 bp, Glycine max
  unsure (1)..(274): unsure at all n locations; Clone ID: 700556772H1
ccaccaccaccgtggaaggtggagcgtgaggctgtttccggtaacctctcccggcggcgctgagtggtgatcaaggaaatgggtcagacgctgagttgcgtgcaacagcacgaggaccatggtgtgctcttccctgcacttgcaagtggagaattggangttgttgaggccatggtggaggaagaccccactgtgttggaacacaccattggctgtgacaggctttctcctctgcatgtcgctgctgccaatggtcggatcgaggttctttcca

SEQ ID NO: 2750 - DNA, 274 bp, Glycine max
  Clone ID: 700556773H1
ccaacaacaccatcctcaaaatctccaaactcgcgatcctcctcgttttgttcgcttcagtctgcaacgtcgctatgtcggactccaccgccaaacccctcgaccagcacgccaccacgggctctgaccctactgcgccagggttcacatcgtgtacaccgagagaccacagaacgaggagcctgaggcctaccacatcagaaccctcacttcagtccttggcagtgaggaggctgcaaaggaagctttgttgtatagttacaagtctgcagcc

SEQ ID NO: 2751 - DNA, 272 bp, Glycine max
  Clone ID: 700556774H1
ttgtaaagccttgttgctgccatggccacccacgcggctcttgcttctacaaggatcccttcaaacacaaggttcccatccaaggcctctcactctttcccaacccaatgcgccttaaagagacttgaggtgacagaattctctgggcttagatccacttcatgtgtcacatatgctaacagtgctagagaatcttccttttttgatcttgtagcttcccaactcactcccaagaccaatggatcaactcctgtgaggggagagacagtggc

SEQ ID NO: 2752 - DNA, 270 bp, Glycine max
  Clone ID: 700556775H1
gtgaagaggaaactgaagagacctgtagcacaaagccacctgtgaaaagcaagttctcaaggacttctaccttgggaagaatagaatggtgtattgaagagaaactttggagatctgaggaaaagggaaatggagttggggaattggaatctgtttcggatagtagctcaccttcaaggtatgagaatggtccattagagaataggtatagaggtatatatgacagtgaacattgggtgaaattgagaaatggagtgcgcaggctgtgca

SEQ ID NO: 2753 - DNA, 269 bp, Glycine max
  unsure (1)..(269): unsure at all n locations; Clone ID: 700556776H1
aggatgatcttgtcgactgtnggtcgtggaggtgaaggagatgtcggacagaggattcgggatgaaatccttgttatccagagaaataatgattgtaaaggtggaangatggaggaatggcaccagaaattacacaataatactagtcctgatgatgttgtaatctgtcaggcactaattgattatataaatagtgactttgatattggtgtttactggaaaacattgaatgcgaatggnataacaaaagaacgacttctgagctatga

SEQ ID NO: 2754 - DNA, 263 bp, Glycine max
  Clone ID: 700556778H1
caagggtgagcttattggtggatcagatattgtgttggagatgcaaaaaaagcggagaacttaggaagaatttacacgagaaagggattcttcctgcagagaccattcaagatcgactgaagaatttgattgcctcgtcccctgtgatgctgttcatgaagggtaccccagatgcaccaagatgtggttttagttccagagttgctgatgcccttcgacaagagggcttgaattttgggtccttgatatattgactgatgagg

SEQ ID NO: 2755 - DNA, 273 bp, Glycine max
  Clone ID: 700556779H1
aaaaaatgtcatccactgctagcttgggttatggggctccaacctgcttcaacaacgttcatcacacaaagaagcagcaagcaatgaggaacagtttcttgagcaataagcacaacagtgtgagagtgatgaagggttggagaggaagacatggtaacactaacaacacatccaaaagggtaggaattgtgcagtgtagagggttaggggacttcataggtggagacttgataaagtttgatcttggacgttggctttcagatgttgaagagc

SEQ ID NO: 2756 - DNA, 278 bp, Glycine max
  Clone ID: 700556780H1
caatgtagctgcaataagtgggctgtatcatgaaattagtcaacgtgggggcaaggacttgttagcttctgaagtgaaagagttgttatttggaacaaaattaaatgacacaaatatcaaagaggaacagatagcagacatgttaaaagtttttgaccgaaatggtgaccaaattataaccaaggaagagtttgtcactggcttaacagaatacattaaccaatcatagcatgctctggatagacaatacctccccaaagaatctctcaacaaaatgt

SEQ ID NO: 2757 - DNA, 279 bp, Glycine max
  Clone ID: 700556781H1
cacttcttctttcatcattcatcgcctttcaccacgcacgcagatcctttattcctataatccttccttcgctctctccaaatttcgactctttcgatcagatccgcgacacccaccccaccaaaaccttgcgcaacccatccatgacgcttggctcaggaggatccagtgtcgttgttcctaggaacttcagattgctggaggagcttgaacgtggtgaaaaaggaattggagatggcacagttagctatggaatggatgatggtgatgacatttaca

SEQ ID NO: 2758 - DNA, 280 bp, Glycine max
  unsure (1)..(280): unsure at all n locations; Clone ID: 700556782H1
gcgcagggttgggctatccatntgtttcgagaatgcggtctctctcagcnaacccttccttantgcganaagctgttccagttttggtcaaaccctacaaatccatnctctctcgagcattcctctncagctcccctggcctccacatctcattctccanaatacncaatntcntagatccgtcangtttttctctactacttctcttcgtaantttaatncacgcgccacccatcncaacgatgctggctctatcgantctcntctcnacagnccatgc

SEQ ID NO: 2759 - DNA, 276 bp, Glycine max
  Clone ID: 700556783H1
ctttttttgttctcatctccacaccatgtcctaatctttctgcaacatcgttctccatttttggctttacaaaaccactgtgtctgattaagggttctttaatatttccaatatttcttgtagtgaaaaagttgttagctaaaagaagaccaagtttttggtgttgtagaaggaagagaagaattaacatgaaaattcagtgtgacgtgtgtgagagagctccagcaacagtgatttgttgcgcggatgaggctgctttgtgtgccaaatgtgacg

SEQ ID NO: 2760 - DNA, 274 bp, Glycine max
  Clone ID: 700556784H1
ttgggagttaggttctgcacgctctgcttccagcgagtgttctttcttcgtttcaacaccttaatttgcacacgctgcttcttcagcttgagaaatggcacaagaaacctttctattcacatctgaatctgtaaacgagggtcaccccgacaagctgtgcgaccagatctctgatgcagtgctcgatgcgtgccttgaacaggaccctgacagcaaggttgcctgtgagacatgcaccaagaccaacatggtcatggtctttggagagatcaca

SEQ ID NO: 2761 - DNA, 273 bp, Glycine max
  unsure (1)..(273): unsure at all n locations; Clone ID: 700556785H1
ccagaganacnaagaaaagaagaaaatggctgtggccaacaatgtgctttgcatttncttcattatctccttaacatgtatggttcnagctcgaatcccaggggtntactctgctggtgcatggcaaagtgcccacgccaccttctacggnngctccgatgcttccggcaccatngggggngcgtgtgggtatggaaacctgtacagccanggttatggtgtgnacacggcggcattgagcacggcgctcttcaacagcgggcttagctgcgg

SEQ ID NO: 2762 - DNA, 274 bp, Glycine max
  unsure (1)..(274): unsure at all n locations; Clone ID: 700556786H1
ctccantgnctgcnnctcttccncctctctctgcatcgctgcgntttccgaatcgaaaggtgaggttagtaagtaacaatggtggagaaggccaagggtangaaggnngangntgtcactcgagagtacaccatcaacctccacaaacgcttgcatggctgcacatttaagaagaaggctcctanagcaattaaggagataaggnagtttgctcnnnaagcgatggggacgaatgatgtnagagtngatgtgaagctcaacaaggctntgtggt

SEQ ID NO: 2763 - DNA, 273 bp, Glycine max
  unsure (1)..(273): unsure at all n locations; Clone ID: 700556787H1
ttccttcttcttcttccaataatgtcttcttcattctctgttcgttttcttgctcctcttcctcnnnnnnnnnnnnnnngcttccccaccagctctctgccgaagacatggctctgcgccgccgccaccccaacggtggctccgtcaaccaccacctcctcctcggaggtggaggcttccaggttggagcctagagtggaggagagagatgggttctgggttttaaaggaagagtacaggggaggcatcagccctcaggagaaagtgaagctt

SEQ ID NO: 2764 - DNA, 272 bp, Glycine max
  Clone ID: 700556788H1
aagagttcgaacaaacaataaccaaaaaagctcgtcgcgcggttgctgctgctacaggaactggttcggttatgttatatgaatccggttcggttcaggttcaacctcgaaccgattcggaacccggttcgacggttcagaggagactatgggtgaaggaccggtcgaaggactggtgggagaagatcagccggaaggacttcccggaggaggagttccggcggtggttccggatgagcagaagcacgttcgacatgatctgcgacgagctc

SEQ ID NO: 2765 - DNA, 258 bp, Glycine max
  unsure (1)..(258): unsure at all n locations; Clone ID: 700556791H1
tccgcaagggcaacgccgccgtcggcgtcccgcggcaccgacaatgttgtcctncggcgtcgagaagaaatccaccgccaaactccaagactccaggtcggtgaggaagatagtgaatctggacgaccacattgcgctggcctgcgcggggctgaaggccgacgcacgcgtgctcataaacagggcacgtgtggagtgccagagtcacaggctcaccgtggaggatcccgtcacggttgagtacataacgcggtacat

SEQ ID NO: 2766 - DNA, 269 bp, Glycine max
  unsure (1)..(269): unsure at all n locations; Clone ID: 700556792H1
tgatgatggagatggcgaangaaacgctgtcgttgcggnactcgcggcgttggtgctactcgcggcgagtgtggcggtggatgctcaggagaactcggacgtgaanacgctggtgaagtacaagcacgggaagaagtactgcgacaaaggatgggaatgtaagggctggtcaatttactgttgtaacctcaccattaccgattatttccagacctaccagttcgagaatctgttctccaagcggaactcgccggtggcgcacgcggtcg

SEQ ID NO: 2767 - DNA, 273 bp, Glycine max
  Clone ID: 700556795H1
caaaggcactctctgcgtaatgcagcttgcatttccggatgctgtgtacttggttgatgcgattgaagggggagaggagcttatcatagcgtgtaagcctgcacttgagtctaattacatcacaaaagtgattcatgattgcaaacgggacagtgaggcattatactttcagtttggcatcaagttgaacaacgtagtggatacccagattgcttattcacttatagaggagcaagaaggacgaaagagattgcgagatgactacatttcatt

SEQ ID NO: 2768 - DNA, 267 bp, Glycine max
  unsure (1)..(267): unsure at all n locations; Clone ID: 700556796H1
actggggagccatcataggttggtatctctgcatgtttcgccctgacaaagttaaggcctatgtctgcctcagtgttccttttctccgcagagacccaaacatcagaacggtagatggcatgcgtgctttgtatggagacgactactatgtctgcagatttcagaaaccaggcgaaatggaagctcagatggctgaagttggcactgggtatgttnctcaaaaacatccttacaagtcgcaaaactggtcctccattccttccgcat

SEQ ID NO: 2769 - DNA, 310 bp, Glycine max
  Clone ID: 700556801H1
gaagccaccaccatggcgatgaccaccacaacgacgtcgtctccaccatttctcttttcattcctttctccaaaaccctttcccccaaacccttcgctccctcttccccaattgcaaaaccgaacaccgctcagttccacccatcgcttcttctctgccatccccaagcgaaacgcggcgtttcagggacccatttgtgcctcgcttctcgcgccaaagccaaacccaccccgtcttcggtggaacaagagagcgacgacaattttagaaaaagagtgttcaaatgcgtgtgggtgcagaaggtgttaat

SEQ ID NO: 2770 - DNA, 302 bp, Glycine max
  unsure (1)..(302): unsure at all n locations; Clone ID: 700556802H1
tctaattctcccatttctcttccaatggcgtcttctctttccaccaaaccattctacanccgacgctctctccgccttcgcttctctcaattccgatctcggatccctctcccccgcctacctccgactctcactccgtcctcgtcttcccaagaacttcgcatacaggcggctgggagtacctatggaaatcactttcgtgttacaacatatggggaatcacatggaggaggtgttggttgtgttattgatggagtctcctcgccttcttctctctgaagctgatatgcaagtggancttc

SEQ ID NO: 2771 - DNA, 306 bp, Glycine max
  unsure (1)..(306): unsure at all n locations; Clone ID: 700556803H1
gtctgttactcatttcttctcatcttctttttcttccctttaaaattattattccgtgcaaacnnnnnnnnnnnnnnnnnnnnnnnacgaagaacaagattagcgttatgggtctcttcctttctaggaatttggcttgcaaattcatatacccttttctttttccaataaggtttcaaaggatttgttccccaagcagttggagaacatgatgtctctggtctctcctcgtactggcaggcattgcagcgtatgacaaaggctgtcgccaagttgtgggatgcattcttacagatacnagancat

SEQ ID NO: 2772 - DNA, 305 bp, Glycine max
  unsure (1)..(305): unsure at all n locations; Clone ID: 700556807H1
ctgatttctgttccatatgttganatgactctgaagttgatggagcgttttggagtttctgtggaacacagtggtaattgggataggttcttggtccatggaggtcaaaagtacaagtctcctggcaatgcttttgttgaaggtgatgcttcaagtgccattatttactagctggtgcagcaattactggtgggactatcactgttaatggctgtggcacaagcagtttacagggagatgtaaaatttgctgaagttcttgaaaagatgggagctaaggttacatggtcagagaacagtgtcact

SEQ ID NO: 2773 - DNA, 288 bp, Glycine max
  unsure (1)..(288): unsure at all n locations; Clone ID: 700556808H1
gngataatctaccaaaatatnccacagatattttnanngtaaaccttaagctcaatcaaatttcanacaacaaattaacaataagaacacgcaaacgcaaaggagctaagaggaagaggatgattgcgggttatgtttgatgatgtgttcagtgatcatcaatatgagaatgttgcctgtttgctcagccaccccacgttattccacatcttcccagattnccttgtttgggggattgcaccccattcgaaaggatcttgagagcagatgtgtggctgaagaaggtgt

SEQ ID NO: 2774 - DNA, 308 bp, Glycine max
  unsure (1)..(308): unsure at all n locations; Clone ID: 700556809H1
caanaaatanaacaacacataataagcaagcaaaacacacacaaaaggaaataccatatattatacacanaccaaaccatatatcttattctattttctccctctccaccannnnnnnnnnnnnnnnnnnnnnncaaccttaatcatggagaatattggagagagtacaagcattactgggagaccaacatgttcctccaaacccaagaacttgacagttgggggttggatgaggccttatctgggtactacgattcgagttccccggacggcgctgcttcgtctgcggcatctaagaacattgtttc

SEQ ID NO: 2775 - DNA, 306 bp, Glycine max
  Clone ID: 700556810H1
gattggtgggtggcgccgtacgcctcatcccatccatcgccatcggcaccttccttaaacgacatcgcgtccatcaccccttttctcttcctcacagtcacagcagtggtagcttcccaaaaaagagtgccaatggcatcttcttcagactcatgggtgaggaatataatgaagcactgaaacttgctgatgatatcagtggcatgatttctgagcagagttcatttcctgcatctggaccagaaacccagcatcattcatctgctataaggagaaagattacaatattggggaccaggcttgata

SEQ ID NO: 2776 - DNA, 303 bp, Glycine max
  Clone ID: 700556811H1
tgtgagtgagtgtatcaatcggccacacagaaatgggcagtgcttctctgattccagtttcctggttgccttggcggccactttctcctttcaagggaacggtgaaaaccttggtcgcaaaaccatggctgaagaagattcagcaagcaagacccctcattccgtggttaacaaggctgcctctctatcttcccccgtgacagcacccagcgtcggcgttcggtttcggctggacaatttggggccgcaaccgggttcgaggaagagggctaagagaaagggtagaggaatatccgcaggcaa

SEQ ID NO: 2777 - DNA, 302 bp, Glycine max
  unsure (1)..(302): unsure at all n locations; Clone ID: 700556814H1
ctactccccaattgtaaataactcatcccttatcttgatgtagtcactgcaagcattctccgttatcagttgtggcattnttggtgctctccagagcttctcctccggtttctttgtnagggttcccaaacgttaganagaaggagaagggattgaanctccattccaaggtcttacnagtntatgcatctttctccattcacaggaaatcgtttgtaaatcccaatggtgacgatgtgcagaattaaattgcgaaccacatatcaaaatttcatgacaatccaatggttaacgagttcggg

SEQ ID NO: 2778 - DNA, 304 bp, Glycine max
  unsure (1)..(304): unsure at all n locations; Clone ID: 700556815H1
cggatctctctctctttcaaatccaatcatttcctgagagacaaaaacaaaataaaaatcgcgttcagatacacttcacacacaaacacaaccaccaatccccaatctctaacttttcccgagaaaattttagtttccattttcatttctccctcagatcccggaaaatatattcacaacattaatttcgcacttcgccctctgccnactaccaagctccggcttcctctgccaattcaatccgtcgtcgttttcgccaattccgaatgcgtcgatttcgggttggagaatgagttctccgacc

SEQ ID NO: 2779 - DNA, 301 bp, Glycine max
  Clone ID: 700556816H1
aaccactgaaccaggataatctgtcttcactcttcaatccgaacttagattgttttactgttaacaccattcctaggtaccatctgcaccaccctttctccttcttcttcaatcaatggcagcaacctcaacatcactcttcttctccaatctccatctctcaaccctcaacctttctcttcctcactctccttcttccgaaatgtccattccaccctctctttcccttcctcttctaaaccctcccgtggcgttgttgccatggctggctctggcaagttctttgttggtggcaattgga

SEQ ID NO: 2780 - DNA, 311 bp, Glycine max
  unsure (1)..(311): unsure at all n locations; Clone ID: 700556817H1
tgcaattgaagttaaaagccttagccttccctacaactccaaacannaaagacatcatcatccatggctgcctccgtctccactgtcggagctgtcaacagagctcttttgaacctgaatggttctggagctggagcttcagctcccagttcagccttctttggaccagcttgaagaaggttattgcctcaagggtccccaacagcaaggtttccggtggaagcttcaagattgttgctgtagaagagaagaaagagattgaagagacncagcagaccgacaaggacagatggaanggtcttgcctatggt

SEQ ID NO: 2781 - DNA, 207 bp, Glycine max
  unsure (1)..(207): unsure at all n locations; Clone ID: 700556818H1
tgagaaggaggttgatgctgctggagatggtgatgttctggtgatattggacttacgtcctgatgagtcattgtttgaggctggtgctgctcgagagattgttaataggattcagaagttacggaanaaagttgctcttgaaccaactgacatggtggggtttactttgaatcattagatgatgacaaatcggtctctcatagagtc

SEQ ID NO: 2782 - DNA, 227 bp, Glycine max
  Clone ID: 700556819H1
tgttcctgctcgtctctgttatctctccacaaaccccacaaccagaaacctcaacttctcagttttaaaaccaaatgtgttgtcactgcgttcattctctcttcctcaaaaacactatcttcgtctccgtccctgcaagtgttcctccaccgcccccgtgtccaccaccacctacgagttttctgatggttcttcggaggtggagttaagattaaacataggaggtt

SEQ ID NO: 2783 - DNA, 303 bp, Glycine max
  unsure (1)..(303): unsure at all n locations; Clone ID: 700556820H1
gganattattattgagagagagagananataaagcgggggtgtgaaaganacggagaaggtctctctgaagccgtagttgagagttganactgagatcgatcatctgtcttacttagatttcgcagcagagagaganantgggagaagtagcgcgtggtgttgttgccctccgatggatctgttccgttcggagccgatgcaactggttcagctcatcntccnnnnctcgtccgctcaccgcactgtctcctacctcggcgaccttngcctcttcagttcaaagatctcaatgcagataagag

SEQ ID NO: 2784 - DNA, 305 bp, Glycine max
  unsure (1)..(305): unsure at all n locations; Clone ID: 700556821H1
gagcgagggagcatggaggagggaaaattgagagagctgaagcaattcatagagatatgcaagtnccaatccctcacttctccacaatccatctctttcattcttcaagacttatcttctcagcctcggtgctcgcatccctccccaacccaaaacggaccaggtgattttgatgacaagtcagatcctcctttatccgcacaaaatgacattgtagaatctgatatagagttggataatgctgatgttgttgaacctgataatgaccctcctcaaaagatgggagatccttctgctgaaataac

SEQ ID NO: 2785 - DNA, 303 bp, Glycine max
  unsure (1)..(303): unsure at all n locations; Clone ID: 700556823H1
ctttgtttcaggtttcatttgattgattcttttcttcaatnctggtttgtagttgtttatatctgactcatgtttctaaatccatgaacagcatatgattttcagtgtcttttccttttccgaagaggaaaaagaaganaagaaaaanaagcttggttgagantttgagagtcaattggttggttgagttctcaatttcttgtggcagttttgttgaacccatcaatcctttctttctatgtatgtacacatgactgtaccatgattttaatttggaaatgaagtagttcggttcagttgtgg

SEQ ID NO: 2786 - DNA, 304 bp, Glycine max
  unsure (1)..(304): unsure at all n locations; Clone ID: 700556824H1
tataagctagtttatcgtgaggagaatatgaagttgtttgttttctttgttgctgcagtagttttggtagcatggccatgccatggcgcaggctaccaaaggttccctctccgaatgaaaactggctatggtgagcgttcttcggaggtaaaatgcgcagttttaggcttgctgtggaagcacacaacatccgagcctttaaaaccnttcctgaagagtgcgttgaaccaacaaaggactacattaatggcgaacaatttagatcagactctaaaacagttaaccaacaagctttcttttatgc

SEQ ID NO: 2787 - DNA, 305 bp, Glycine max
  unsure (1)..(305): unsure at all n locations; Clone ID: 700556825H1
catanccaccacngantntctctatctgctttcttcncaaagagtaactcantcttctaaaaactttctcaaaaccattattattctctaatctttcgntncttcaattaattaattggtttcttgctatggctgtggantctgcgattncgtcnccatgggtcncccggcntgtnanaannacgcaaaggcgttgnggttcntcnaagaaatgactcgcaacgccgacgccgtccaggaganantcctgggggagattctcacacgcaacgccnanananagtaccttanncgcttcgnactcg

SEQ ID NO: 2788 - DNA, 301 bp, Glycine max
  Clone ID: 700556826H1
atcaatgccaaaattggaggaagtaatgtggagctcatcaataggctaccacactttgagggtgaaggtcatgttatgttcataggggctgatgtcaatcatccagcttcccgggacatcaacagtccatcaattgctgctgtagttgccactgttattggcctgctgcaaatcgctatgcagcacgtgtttgtgctcaaggtcatcgggttgagaaaattttgaattttgggagaatttgctatgaacttgtttcgtattacgataggctgaacaaagtcaggcctgaaaaaattgttgt

SEQ ID NO: 2789 - DNA, 282 bp, Glycine max
  unsure (1)..(282): unsure at all n locations; Clone ID: 700556827H1
cgaagaattaaaacaccagctgatacacttcccctttaacttcacatncntttctctgtgccattttattatgatacaaattgatactattctgtatcaaatttcagtcagatattggctgtgtacatagggttatatattgatgcactgtatttgtattcaaattccaattccaaatggcgaacatatttgattgctgttagtttcccaggttatgtagactatgtgacaatgcagcattatttggatttgcccgatattctggctatttcatttgcttat

SEQ ID NO: 2790 - DNA, 301 bp, Glycine max
  unsure (1)..(301): unsure at all n locations; Clone ID: 700556828H1
cgaactactccgaagccgctcacgttatccacacaacaacactcnggaaaccctaaccaaccatggcttcttccaccttcaccgcaatgtccgcttgcaagctttcctcctccgcngccatctcctccttccccacccaccgccgcaccaacgccgncttctgtccagacgcagccgcgccgccagggtctccgccatggccaaggagttgcacttcaacaaagacggcaccgcaattaggaagctccagagcggtgtgaacaagctcgcggatctggttggggtcacgcttggtcccaag

SEQ ID NO: 2791 - DNA, 299 bp, Glycine max
  Clone ID: 700556829H1
atcaatttgggacgttcttcttcttctcagctgcaaggtccaaaaagtcagtgtagtgaaaacagacgatccgaagaatattaccctctttcatctctctctataacattattcataagttcagtttgatcttatgtcaatgaaggatttttagaaaaacccagattcacaggaaaaacccttaaagcggagaataaaaggcaacgacttttcatctctacgcaagtgattatggcggttgttgagaatgttggggccaaaatcggttcttcgagccagagtttggagaacggtgtagt

SEQ ID NO: 2792 - DNA, 291 bp, Glycine max
  unsure (1)..(291): unsure at all n locations; Clone ID: 700556830H1
gncttcgaggcgccttagagcatagtgtgatattngtggagtttcttctnncaatttgtgtccatggagaaaaattctcttgattatagtcctttgctttctcctcgtggtgatgaaaatggaagtgagacaacagcatctcctcttggtcagctactaaatggactctcaagactttgatcttgatgatctttgttctatgggcagctttcatcttttttctccctgcaaagcctgtgaatgagttgttctcaaaatggaatgatctcaaccgtgacactccttttggag

SEQ ID NO: 2793 - DNA, 300 bp, Glycine max
  Clone ID: 700556831H1
acttaagtagaagtgctttactatttggaagtccaaaccaaaaagacgactatctgaaggatgcacaaaagtactttggcaagtctaccgcatacattgaatcactgaaggccatccgtggacagaaaagtagcaaaaagaatatttcaagagataaatgttaagagaagctcaagtagtggcctcttgttcctacgaaaataacacaaattggggcacagaggtgggattctcatatggcatattactagagagtactattactggctatcttcttcacagcagaggatggaaatcagc

SEQ ID NO: 2794 - DNA, 299 bp, Glycine max
  Clone ID: 700556832H1
agtgtgcatagtacacctgtggaaatgcgtgaaaaacttgccataccagaagcagaatggccaagagccattgcggagtttgtagtctgaatcatattgaggaagcagctgttctgagcacctgcaacagaatggagatatatgttgttgctcttccaagcaccgcgttgtcaaagaagtcactgaatggatgtccaaaacaagtgggatcccggttgcagacctttgccagcatcagtttctgctatacaacaaagatgcgacacagcacctttttgaagtatctgctggtcttgatt

SEQ ID NO: 2795 - DNA, 295 bp, Glycine max
  Clone ID: 700556833H1
caaagcttcaaactcaaaagcaatggcatttgatcccgtgcaacccgtcgcaaagaaagcaaggtcaggtggtgagattgtgagtgcaagagagcctctgcttaatggggttcatgactctgaaagctattccgtctctgctgcaattctccatttctcttcccagctttgggtggcctactatttggctatgatattggtgccacatcttcggcaaccatttccattgagtcaccaacattaagtggagtatcttggtacaagtgtctctgttgaaattgtctcctactagtgg

SEQ ID NO: 2796 - DNA, 301 bp, Glycine max
  unsure (1)..(301): unsure at all n locations; Clone ID: 700556834H1
caataccaggcttgtcaaatccactattgtgcactttcagctgaggaatttgttgtgggcaacttcgaagcatgatgtatactttatgcaaaactattcagtgatgcactggtccgcattactacgaaggggtaaagaagtgcttaacgtagccaaaccattattccaacccttaagcgtcctggatttttagctcaacctgtctccagagtgcaaataagcaccatgactgttaaggaaaatctgatggtggcagtggtttcagggtgagctatatgtaagaattgaacntccggagttc

SEQ ID NO: 2797 - DNA, 293 bp, Glycine max
  unsure (1)..(293): unsure at all n locations; Clone ID: 700556836H1
ggcagcaactgggagggcgcattagttttaggggacaagtgcaaaattaccaaaacacagtgtctcaagtggtaaatttactgggaaatgaggactcagctgcaaattacttgagcaagtgcatatactcaattgggttgggtagcatgattacctcaacaactacttcatgcctcaattctattccagcaaccaggcagtactcaacngatgagtatgctgatgttcttnttcaagcatatactgancaactaaaaacttggtatattatggagccaggaaaatggtgcntt

SEQ ID NO: 2798 - DNA, 302 bp, Glycine max
  Clone ID: 700556837H1
tctagaagccccatccaatataatacacttccaatctcttttatgcaaggctaacttgaacactggaagtgtgctggagtatgcacttgctttcgctagtgctgcgttggataaatattgtaataaatggagtgctgcacccaaaacgggcttcatgacatcacaatttctaaagatttctatcgaatatacagtggtctccaaattggatacttggaagaatctgcccaagtgccatcaaatagtcatgaaaggctgggagattcaattgcttgggggggctgcactataatttatttgct

SEQ ID NO: 2799 - DNA, 169 bp, Glycine max
  unsure (1)..(169): unsure at all n locations; Clone ID: 700556838H1
ggggtactcatgattatggtttangtgganaagttccacttgagaatggtaatcagtctgcattancatctgtntctangcttcctcagctttnncatactacntctgntttgagtaatggaatganaggngcncctagcnccattnntnctanganccagttnttgac

SEQ ID NO: 2800 - DNA, 304 bp, Glycine max
  unsure (1)..(304): unsure at all n locations; Clone ID: 700556839H1
atttgcaacccaaccttacacgaagcccctcaacggttctggaataggtggaattttctagaaccccaaccactctccataaaagcccaaaccctaatcttcttcactctgttgtngttttcagtgtagtggaagaatcactcccttatcnatttcccaccacaccatangngcaaccaacgctctctcttcagcctccattctacgctctcccaaccgccagtctctgacccgaagagcgaaccataatggaagagtaaattaccggaaaccgaataaccgtttctccgtgaaagcctccgcc

SEQ ID NO: 2801 - DNA, 151 bp, Glycine max
  unsure (1)..(151): unsure at all n locations; Clone ID: 700556840H1
ctcgcttttctcacaaaacanannanattnanaatttctccgaagactgtgtattatncgttatcgttcactgagttaggttttgctgttcttcctagggttttattgtgtccaataacaagaggagggggaagagaaacaaaacaaaaaa

SEQ ID NO: 2802 - DNA, 302 bp, Glycine max
  unsure (1)..(302): unsure at all n locations; Clone ID: 700556841H1
gcgaganatggcgatggcaatggcgcttcgcaggctttcatccttcaattgacaagcctctgcgccctctcttcaatgccggttccctctactacaagtcgtctttgcctgatgaagctgtttacgacaaggagcgacccggagttacatggccgaacagttgaatgctccacttgaggtcgtggatcctgagattgctgatattattgagcttgagaaagctaggcaatggaaggggctagaattgataccgtcagagaatttcacctctgtgtctgtgatgcaagcggttggatcggtta

SEQ ID NO: 2803 - DNA, 301 bp, Glycine max
  unsure (1)..(301): unsure at all n locations; Clone ID: 700556842H1
tctaagancttccagaagaggaagaaacagtcaatgttaatgtcatcagattctgaggactcatacagcagcaacagcgtccatggccttaagaaaaacttcaaagttcagagcttcacaccatccacaccacccccaacatcggttaattacagacggccaagagaagaaagggaataccacaccgtgccccaatggttggactaatcatagaatattagatagttggtatttttaggttattggctacaatgcccttaggtataaaaataccatagtatactaaagcaagtgtttcgac

SEQ ID NO: 2804 - DNA, 299 bp, Glycine max
  Clone ID: 700556843H1
ggcgatggcaatggcgcttcgcaggctttcatcttcaattgacaagcctctgcgccctctcttcaatgccggttccctctactacaagtcgtctttgcctgatgaagctgtttacgacaaggagcgacccggagttacatggccgaagcagttgatgctccacttgaggtcgtggatcctgagattgctgatatttttgagcttgagaaagctaggcaatggaaggggctagaattgataccgtcagagaatttcacctctgtgtctgtgatgcaagcggttggatcggttatgaccaa

SEQ ID NO: 2805 - DNA, 296 bp, Glycine max
  Clone ID: 700556844H1
tatgatatcagcatcctggtctggaaggaccccaaagagggtaactggtggatgcagtttgggaatgaccatgttatgggatactggccggctcctctattctcgtacctctctgacagcgcgtcaatgattgagtgggggggagaggttgtgactctgagtccgacggccaacacacctcgactcaaatggggagtggccatttccctgaggagggttttggcaaggctagttacttcaagaacattcagattgttgatggtgacaacaagcttagagctccaaaagaccttggc

SEQ ID NO: 2806 - DNA, 297 bp, Glycine max
  unsure (1)..(297): unsure at all n locations; Clone ID: 700556845H1
gttgaatttttattctgttcattcgccttaagacaataatggggtctgtttgctcggctgagaaaaataaaaacaaagaggttggagggaaaaccttggggaagaagcttaagaagttaaaaagcattgcaaaggganaaggagattgttattaaattcaaggactagtgatcgtggtagaaagcaaaaggagcgaaactctggattttccagtgaattcaacttatccaatcctagtcgaaaagaaggaaaagaggacttccagagaggctccttttggggaagagctagtgagag

SEQ ID NO: 2807 - DNA, 295 bp, Glycine max
  unsure (1)..(295): unsure at all n locations; Clone ID: 700556846H1
gattggtgttggggttttgcgcaggaacatagtcaacactcaacataggatagatagtttgttcgttgcgttgccatgtcggcgtcggagattcttcgggaactggattcgctgaaggacgaaaagaccaaaattgagcacaaaatctctgcgttgaagctcaactcagagagattaatctccaaaacgacgccgcacctcccaatgcttcttcttcttcatcgtaccccaccaacggattganccaggacatgattcacagatacagtcgcaacttgtgctcccttctttggng

SEQ ID NO: 2808 - DNA, 297 bp, Glycine max
  Clone ID: 700556847H1
gttcagtatagatggcaccgtactctctaatattccatactacaaaaaacatggatatggggtggagaaatttaactcgaccttgtatgatgaatgggttaacaagggcaatgcaccggcactgcccgagactcttaagaattacaacaagctgtgtctcttggcttcaagattatattcttgtcaggaagaacactggacaaacaggccgtaacagaagcaaacttaaagaaggctggctaccacacatgggaaaaattaattctcaaggatccacaagatccttccactccaaat

SEQ ID NO: 2809 - DNA, 251 bp, Glycine max
  unsure (1)..(251): unsure at all n locations; Clone ID: 700556849H1
ggaagcccgagaatcaaaatcatgcaattatatttacgcgtggaaatgcagtccaaacaattgacatgaatcaggataactattttgaggaggctttgaagatgaggaaccttcttgaagaatttcattcagntcatgggcttcgtcctcctactatcttggtgttagagaacatgtcttcactggcagtgtctcatctttagcatcattatgtccaatcaagaaactagttttgtgactttggggcagcg

SEQ ID NO: 2810 - DNA, 298 bp, Glycine max
  unsure (1)..(298): unsure at all n locations; Clone ID: 700556850H1
cagcatctttcgtaattttcttcactgctatttgccattgtcactctcattctcgatggcggcgaagatttcattggcaattggtttgagaactctcttcactgttttgggacttcttatgcttgctatcgttctttacactgtcttcaccgatggcttccgtttcgcaaagaacttctcacaccgtggatggcagcnactttgattgattttatatcaacgttgtagctttggcggtctggattgcttacaaggaatcaaacttnatcagctcaattctgtggattgtttgctgtcc

SEQ ID NO: 2811 - DNA, 295 bp, Glycine max
  unsure (1)..(295): unsure at all n locations; Clone ID: 700556851H1
tctagggtttacagagaagctaagaggcgcagcgtaagcaaaagctcgtggaattgctagcaatggcgaggatcaaggtttacgagctgaggcagaagacgaaggctgatctgctgaatcaactgaaggacctgaaggcgganttgccttgcttctgttgctaaggtcaccggtggtgcccctaacaagctttccaagataaaggtggtgaggttgaacattgcccaggttttgacggtgattctcagaagcagaangctcgttganggatgctacaagaataagaatnttgccc

SEQ ID NO: 2812 - DNA, 298 bp, Glycine max
  Clone ID: 700556852H1
gtttcaggatgaattctcagtagatttgcaagtgtttgcccaaaaattattgagagagcatttgacaatgaaattctcttagaatatatatcttttttgcttttcgaagtcatgcacatatattaggcccttcttaccttttcaaaaatggttcaagagatgtgtcttttcaaaaaagctttttctgaaattctttactagtaatcgataacaggtttctggtaatcgattacacagttatatttgaagggtcataacttttaaattgaattccaagagtttcgttactgataatcga

SEQ ID NO: 2813 - DNA, 300 bp, Glycine max
  Clone ID: 700556853H1
gtttcaggatgaattctcagtagatttgcaagtgtttgcccaaaaattattgagagagcatttgacaatgaaattctcttagaatatatatcttttttgcttttcgaagtcatgcacatatattaggcccttcttaccttttcaaaaatggttcaagagatgtgtcttttcaaaaaagctttttctgaaattctttactagtaatcgataacaggtttctggtaatcgattacacagttatattttgaagggtcataactttttaaattgaattccaagagtttcgttactgataatcga

SEQ ID NO: 2814 - DNA, 300 bp, Glycine max
  unsure (1)..(300): unsure at all n locations; Clone ID: 700556854H1
ttttttatttcccagaaagggcaatganataattccgtaaaattacaatttttttctttctataattctccaaagactaagagggggaaaaacagaagtaaaagacttgaaaattttcccatagatgattttttttttcctaaagggcataactgaaggaaaaaaaaaaggtaaaggtttggnctgaaanagaaggcgtgaggnancttttgaatatggngggcaaggaggtgaggatggagggtttcgacgttttctctgtngacctcaatcaccaacagcctccgccccangccaccg

SEQ ID NO: 2815 - DNA, 298 bp, Glycine max
  unsure (1)..(298): unsure at all n locations; Clone ID: 700556855H1
ttattttctgcgtcaattttgctgaaaaccttaagtgggtatcctgaaaacactagattttcgattcgtttggtaagcggatttttaggtttgattattacgtttttctgttcttgttggatatggaggtttcggtgattggaagctctcaagcaatctgggagcgtcggaattggcatctagggaagttggattttgcaatcttaagaacnatttaagggctttgaatgatagagttagttttggtaggaataatatacggtgggagaaggctgggattagcttcactttgagggcc

SEQ ID NO: 2816 - DNA, 252 bp, Glycine max
  unsure (1)..(252): unsure at all n locations; Clone ID: 700556856H1
tcacaatcacaatggcgcgagtggatctggatggtaaccccatcaagccacttacgatctgcatgatcggcgctggcgggttcatcgggtcgcacctctgcgagagctcatgtccgaaacccctcacaccgtcctcgcccncgacgtctacagcgacaagatcaaacacctcctggatcccgccgattcccccctcccttgggctggccgcatcaccttccaccgcctcnacatcaaacacgactctcgcct

SEQ ID NO: 2817 - DNA, 299 bp, Glycine max
  Clone ID: 700556857H1
catgagtcaaaacctaatgaaccagtggtccagtcaactgaagaatttcatgcactgaaccttactcaaactataagcagtgccttctttccacgattcagtccagatgggaagtttctagtatttttatctgcaagaagtgctgtggactctgagtgcacaatgctacaaattcacttcacagaattgattggccaacagatggaaagctgttccaatcttccaaaatttatgatatcattcctgttgtgatgtgtgctgaggatggctgcttccctgggctttattgtactactatc

SEQ ID NO: 2818 - DNA, 297 bp, Glycine max
  unsure (1)..(297): unsure at all n locations; Clone ID: 700556858H1
gctganagtnaagaagtancacagatgtttccattcgggcacaagggtcaanagataaaggggactatggtggttatgcngaagaatgtgttggatatcaacagcatcaccagtgttgacgggatcgtcngcaccggcttngacttcttctgagtgcactcgatacngttacttttttagcctcctccatctccatccancttnttagtgcnaccaaggctganggtgggaaagganaagttggaaaggctacaaatttganagganagataacattaccaaccataggagctaagg

SEQ ID NO: 2819 - DNA, 298 bp, Glycine max
  unsure (1)..(298): unsure at all n locations; Clone ID: 700556859H1
ttacaatccanctccatcaagtcctccagttggtggaagccatgatccaactccttcaccaccctcaggtggtggtggaagttacaatccaactccatcnactcccccaggtggtggaagctatgatccaaccccatcaccacccacagatggggaagttacaatccaaccccatcaccancctcaggcagcaactgtggcacaccaccacatgacccctctactccaacaccctcagtcccaacaacaccatcaaccccaacaacaccatcaaccccatcaacaccatnacaccctc

SEQ ID NO: 2820 - DNA, 295 bp, Glycine max
  unsure (1)..(295): unsure at all n locations; Clone ID: 700556860H1
gctcttcactacaaccttgcttcccatagataacatctgcatcagacaatagacaaacatgtattccttaacatgcacaccactnnnnnnnnnnnnnnnnnnncatcacaccactctaaagnnaaacctcaaccctcttctgggtgcagatcaacttctaggccatgttctctacccttgaaaagaagaacatgctttactaccaaagccattctctcatccaccagagaagatgtcttgaagcatttcaacgaacgacgagctctcaagattatctcaggcttgcagaatttca

SEQ ID NO: 2821 - DNA, 295 bp, Glycine max
  unsure (1)..(295): unsure at all n locations; Clone ID: 700556861H1
tgacgttgagaaaaggcatggccaagagcaaagtcacgattgacttcaacttgcggccacaaaggcaataaccagcaccatcatcgtcaaatgcaaacaccatagattgagaaattagggagcgtggtcaactgatgctgtgcaaaggggnatttcggaaagaaaaataaaaatttaaaacgttgacagatgtcaatttttaattgagtcgcaggtttttccagtctcttgcatatcggaggatatataacaaagctcttaataaaaacacaaaccctaagagccaaacacgacg

SEQ ID NO: 2822 - DNA, 295 bp, Glycine max
  Clone ID: 700556862H1
gtgtaaaccctgcttctccctcatctcattgagagtagaagacagcaagggctagttagtgatttggtcttccctctgaaccagatggagttgttatgcactgccaacgcgattctcccctcacgcagcctctctattcccacaccctattgctacccctcaaaacctcccttccgttcccgcgcttcaacttccccaaaatcgagagattacgagggttgcagccctgtgtgagtgtgagtgaaggcagttccgctgaggctgaggtgttggaggagagccgaattcgtcgagt

SEQ ID NO: 2823 - DNA, 296 bp, Glycine max
  unsure (1)..(296): unsure at all n locations; Clone ID: 700556863H1
gctaactanacaaaattctgatctcactgtacagtatcaaccaaaccaacaatccaacaccatgaaactctctgtgttccaccatcagcaccatcctatgattctcaattgcccccttaccttgacaaggacacacaaaagactttacaacatggttcatataggtggttaccatgccactgctcacattcttccacaagtaaaactgctgcagaaccagttacagtttctttaagtattgaaggaaggagagcattactcagttgtctcctcacaactgttgctggagtctatgc

SEQ ID NO: 2824 - DNA, 295 bp, Glycine max
  Clone ID: 700556864H1
cgagaatttatcccaagcaagagctagtggtaggagatttgccacctcagaaactgagcctttaccgaactcagaatcacagaatccccgaaggcattcttcctcatctgttgccggtggcttacctccactaggaagggctgttccttcattcaggcatctgatagaagaggaggatcctccatgcctgcttataggaaggatgagtacaattggcgatatgacagtgatgaacttcctgaggacataattcaagcttcaagtgctttggaaaatcttcaattggacagaaaag

SEQ ID NO: 2825 - DNA, 238 bp, Glycine max
  unsure (1)..(238): unsure at all n locations; Clone ID: 700556865H1
gtcatcttcctgaagcngaaaagtgtctctantntcaagnaccttnnagatggctttgagcttnttcttcatncatttntnttattgttttaaagattcaaaattttcttttcgatgttttctggcaataaattaatctgtttgggaacttggagtgaaacttgtggtgattcaatgtaaagaataaagtccatttggataaaaaaannnttagaggannagngggggccnccccccc

SEQ ID NO: 2826 - DNA, 300 bp, Glycine max
  Clone ID: 700556866H1
tttcaacaaccatagccatggctttctccttctccaaagcacttgtccttgcctgctccttctgcttatttgcgtctttggcttttggacgcgatttctccattgtgggctattcatcggaggacttaaagtccatggataagctcattgaacctttgaatcatggatgtcaaaacatggcaagatttaccaaagcattgaggagaagcttcttaggttcgagattttcaaggataacctaaagcacattgatgagagaaacaaggtggtcagcaactactggcttggcttggaatgagt

SEQ ID NO: 2827 - DNA, 294 bp, Glycine max
  unsure (1)..(294): unsure at all n locations; Clone ID: 700556868H1
anaagattaacaataaaagtgtggagtactgttgatagcaaagatgtttgggatcttcgacaaggggcaaaagataaaggggacagtggtgttgatgccaaagaatgtgttggacttcaacgccataacctccatcggtaaaggtggtgttatgacacagccaccggcatcttaggccaaggcgtcacttagttggtggagtaattgatactgccacttccttcttaggccgtaatatctccatgcaattgatcagtgctactcagactgatggcagtggaatgggaagttgga

SEQ ID NO: 2828 - DNA, 299 bp, Glycine max
  unsure (1)..(299): unsure at all n locations; Clone ID: 700556869H1
tcattcaccacatntnatttncacaaatcatcaatggcctctcttgtatccncaagtgttcntttncacctactttctcataatttcngcgnnccatttgggcgcanagcaagaattctgagtgaaaaggaccaacaacaacaattgcngtccgatacnacaanaggccctcttctcagtggcaaaatctccgtcnatctcatctggtacggtaacttcaagccttcncagcgagncatcatctccgntttcatcacctccctttcatctcncanatccacagcncaaccatccgtcgg

SEQ ID NO: 2829 - DNA, 289 bp, Glycine max
  unsure (1)..(289): unsure at all n locations; Clone ID: 700556870H1
ttgtgattcaacaagctcgcacgatggaccgtcacctctctccctcgttnccaaatttccccagccagcatgtccattttcagcgtgctaaccatgatgtcaggagttgttctatatgaacgcctctttgttccctttgcgcgcaattcacagggaacccttctggaatcacatgtttgcaaagaatgggaataggcttcataatcaatatcatagccactgtgattgctggcctaatggaaatgaaaaggaaatctgttgctgctaagtaccacttattggatgatcc

SEQ ID NO: 2830 - DNA, 298 bp, Glycine max
  unsure (1)..(298): unsure at all n locations; Clone ID: 700556871H1
agcggcggcaatggctatgctgggggaggacggtcgcggctacgaactggcacggaagcttgacacgtgcggcgtgtggcgaacctggctcggcgacgccacctacgccaacttcgcacccttcctctcttccccttccgcctgggactccttatcacctccacnanncacntccctctccancngcagagtccgcgccctcctcttcgacaaagccaccgcttccctctccccaaaccctaatccctctntntctatccnacgcctcanccctagttacctccaatgcacgccgacg

SEQ ID NO: 2831 - DNA, 262 bp, Glycine max
  unsure (1)..(262): unsure at all n locations; Clone ID: 700556872H1
gtgaaggcgtgaanctagccacacnttnangcattgttcagttcttgaaggaaagacgagcagagaagagaagagagtttcaagaatggggagcgaagaggagaagggtgaattcacttgcgatactacgtgggccacaagggcaagttcgggcacgagtttctggagttcgagttcagacccgatggcaagctccgctacgcgaacaactccaactacaaaaacgacaccatcatccgcnaggaggtttacctcaaccctg

SEQ ID NO: 2832 - DNA, 298 bp, Glycine max
  Clone ID: 700556873H1
agctcattgaactctttgagtcatggatgtcaagacatggcaagatttaccaaagcattgaggagaagctgcacaggttcgatattttcaaggacaacctaaagcacattgatgagagaaacaaggtggtcagcaactactggcttggcttgatgagtttgctgatttgagccaccaagagttcaagaacaaatatctcgggcttaaggtagactactctagaaggagagagtcccctgaagaattcacttacaaagattttgaattgcctaagtcagtggattggagaaagaaaggt

SEQ ID NO: 2833 - DNA, 294 bp, Glycine max
  Clone ID: 700556874H1
tattgttttcttcatatcttccttgtcactgcccgtgtgtcgccgccatggccaccgtcaccacccaagcctccgccgcaattttccggccatgtacctcgaaatcgaggtttttgaccggctcttccggtaaacttaaccgggaagtgacatgcggccaatggggtgccctccttctgcctctttcaaggttgaagccaagaagggagagtggttacctggcttggcctccccaacttacctcaatggcatcttcctggtgacaatggatttgaccctctggggctagctgag

SEQ ID NO: 2834 - DNA, 294 bp, Glycine max
  unsure (1)..(294): unsure at all n locations; Clone ID: 700556876H1
caaaataananaaaaaactttgcaatttcgtaggagatgctcaggagcagcacgctaacacagagtgttacagtcacctgtgttcatcacagtcacagacaatggttccaatcaattcccgtaaattatagattctgtgacgctgctcggactctctatcatccaactccgccatcttcaagtggaaaagaacggctaattataatcgtaaccgttctggaatgggaaccttcaccacgcgcgcgttggcgcagcggctccagaacgccgacgaactcatcgattccgtcgaga

SEQ ID NO: 2835 - DNA, 293 bp, Glycine max
  unsure (1)..(293): unsure at all n locations; Clone ID: 700556877H1
gaagaacaagtagttgaganctaagaaggagaagcaaatggcttcctcaatgatctcttccccagctgttaccactgtcaaccgtgccggtgccggcatggttgctccattcactggcctcaagtccatggctggcttccccaccaggaaaccaacaatgacattacctccattgctagcaacggtggaagagtgcaatgcatgcaggtgtggccaccagttggcaagaagaagtttgagactctttcctacctgccagaccttgatgatgcacaattggcaaaggaagtaga

SEQ ID NO: 2836 - DNA, 291 bp, Glycine max
  Clone ID: 700556878H1
tcaagatgctgctgagtgcttcttcactcaagcatttcaccaaaatctagtcctcaacttagattatggttgttttttgtcacataataaaaagctatggttgaattgaagattcttgattctcattgtattcaccatttttggttaagtgtcattataagtattacagctgttactcgttccttggtgcttttcttcccttgttgcttttccttcccttgttgctttccaattattcagtgagtggaaaataactgctcgcacaattctggtactggtttcttgattctt

SEQ ID NO: 2837 - DNA, 284 bp, Glycine max
  unsure (1)..(284): unsure at all n locations; Clone ID: 700556879H1
cacaaatctttttctaagtgtagtagaggagaggaaccgcgccaaccctcnnnnnnnnnnnnnnnnnaatccttttataacatttatagtttcattcttaatcgttgggaaananttcatcgagaattttaaggtagagatcctaatgtgaagtacaccgagactgagattcagtccgtgtacaactacgaaaccaccgaacttgttcacgagaacaggaatggcacctatcagtggattgtcaaacccaaatccgtcaactaccaatttanaaccaacaccca

SEQ ID NO: 2838 - DNA, 294 bp, Glycine max
  unsure (1)..(294): unsure at all n locations; Clone ID: 700556880H1
ggatttcactgaccctgattggttagngaaatcccttcttttcccacctggtattgttttccatatgctccacatcctatccacgttggacaccaanggatttcactgaccctgattggttagagtccgcatttttcttctacgatgagacaagaaccttgtgcgcgtgaaggtgaaggattctcttgacacaagncnagttggggtatgtttaccaagatgttgacattccatggctcaagaataagcctaaacctaaaagatctaaagctaagaagttggcattggcacaag

SEQ ID NO: 2839 - DNA, 260 bp, Glycine max
  unsure (1)..(260): unsure at all n locations; Clone ID: 700556881H1
tagtgtatgccactctggttaattatcatacccccttctaggcatagttcttctccctctgttctctattctacactgtgaaaccaagatgaaggtagcatttgtagctgttcacttatttgccttgtcctaagctcctccttgttcgaggtgtcnatggccggttctgctttctgctcctccaagtgcgcgaagaggtgttctagggctgggatgaaagacaggtgcacgagggttctgcgggattgctgcagcaagtg

SEQ ID NO: 2840 - DNA, 292 bp, Glycine max
  unsure (1)..(292): unsure at all n locations; Clone ID: 700556883H1
gccaatctgtggggtatgtgtttattactggacattttgtcgatagtgattggaagttgcagaggagaattctgaatgttgtgatggaaccataccctaattctgactctgctctcagccatgctgtagctgtttgcatttctgattgnattggagggcaagctgttttctatcacttgtggtcagtcactgagtgaagttgcccttgggaatctcagaccgttactctttgtgaagaatccacttatcctcaatggtcagttgctgattggaaattgcattgcccgaactt

SEQ ID NO: 2841 - DNA, 242 bp, Glycine max
  Clone ID: 700556884H1
gcaatggctggaatggttcccctttgcattgcatcattggtcactctttttgttgcaacaagtgctagaattcctggggttttcaatggtggtgcatgcagggtgcccacgccactttctacggtggaaatgatgcctctggaacaatgggtggggcatgtgggtacgggaacctatacagccaagggtatggcgtgaacaccgcggccttgagcacggcgctgttcaacaacgggttgagc

SEQ ID NO: 2842 - DNA, 294 bp, Glycine max
  unsure (1)..(294): unsure at all n locations; Clone ID: 700556885H1
cgaaggannacacagatctatatgaaagagaaaaaccagtgcactttctattatttctttcactaaattggattctgagaatctcagtggagcctattaaggctctgcgatatgcaccatacgttattcggtgttgtgcttttcggcgggagattgggtgggagaaagagataattcttcttcactcaaatttaaatatcatcattgcaatttattgatttcgattctgctcccccatttaattgcattgcttaatatacagcaacacgggtgatggcagcgacgacggcgatg

SEQ ID NO: 2843 - DNA, 296 bp, Glycine max
  Clone ID: 700556887H1
gtccatccaaatcttaaaaatattcagtgaagatcaacctcaatggcatctcttggcgtgcgaccagttcttccccctccattaacttccatctccgacccacctcctcttttcgatggcaccaccaggttgtacatcagttattcttgccctatgcacaacgtgtgtggatcgctaggaactacaaggggctacaagataagatcaatttggtccctattaaccttcaagacaggccagcttggtataaggagaaagtctaccctgaaaataaggtgccatccttggagcacaat

SEQ ID NO: 2844 - DNA, 287 bp, Glycine max
  Clone ID: 700556888H1
cagaaagcaagctcatcctagagttttaaaaatggcagcagcctcctccatggctctctcttccccatccttggctggcaaggccgtgaagctgggcccatcagcccccgaagtcgggagggtcagcatgaggaagaccgtaccaagcaggcctcctccggaagcccatggtacggcccagaccgcgtcaagtacttgggcccattctctggcgagcccccgtcctacctcactggcgagttcccaggtgactacggctgggacactgctgggctttcggccgaccc

SEQ ID NO: 2845 - DNA, 291 bp, Glycine max
  unsure (1)..(291): unsure at all n locations; Clone ID: 700556889H1
gactcaggtggtagtttaggtatcctctgaaataaaacgancaagaaatagtttttgcgaactactggactggaattatgaaaatgtagtgacgtgttgccgaaaaagcttaaagtcaactggatgatggtgtaaaaatagttacctcgcttctgaagccggattcatgaggtgatggtgttcctcttttagnntgttgtagcgttcaatcacagatttcatgctgtcataatgtaggaagtcnttacnagagcacgttagcatatttttttgtaagtaaataaaagatgt

SEQ ID NO: 2846 - DNA, 298 bp, Glycine max
  unsure (1)..(298): unsure at all n locations; Clone ID: 700556890H1
ctngcnnactncanagacagtgttaaccagcagnntgaaggangcagaaaagagttagagcattagggtgttttctaggttcanattgtctgtcaagagncagtgcaacgatgaatnagatcggtnagcatgatgggggggantaaatcaanaccctttaacggnnggaaatttgatgtacgtccttaacattancggtttggagagaatcccntgtgattagttgctaaaggatncacggtgatanatccatatgganaccntgtgnatcgngtggncanttacntcgtgcaccccg

SEQ ID NO: 2847 - DNA, 290 bp, Glycine max
  Clone ID: 700556891H1
cagtacaaaatttgatggatcttctatccttaagagatgtagttccaatgccaattctaggaacgttgactcagaacgagccaggtttgattccaactggttaaaccgttggatggaattagataacaagagcagccaaactggagagcttcattgaaaaatggacgccctgatgatgataaaagtgacaagattctcgaagtggatacttggaggccacacttcaagtctcaccacagtagcagctccttccaagcagcacattattatttgagttctgattacaataa

SEQ ID NO: 2848 - DNA, 289 bp, Glycine max
  Clone ID: 700556893H1
gctaagagagaatatggagagtagtgagggaattaggtgtaaggtatgcgtgaccggcggtgctagttacataggctcttgccttgtcaagaagcttctgcaaaagggctacaccgtccactccaccctcagaaactttaaggacgatcaaagataggccttctgagagggttgcctcatgctaatgatgagagactggtgttatttgaagcagacatatataaaccagacgagtacgagccagcaattcaaggctgtgagattgtctttcacgttgctactccctatg

SEQ ID NO: 2849 - DNA, 288 bp, Glycine max
  unsure (1)..(288): unsure at all n locations; Clone ID: 700556894H1
ttcggtaacaagattagcacccaaactggtattggaacagcgattgcaattgctggtgtggcactctactcgttcatcaaagccagaatggaggaagaaaagcgacaagcaaaagcagcataagaggaaagtcgtcaacctggagntgtcttgcactgtaaatcaccacaaatttccttcaaaataattgagtgactggttcagtgttgtactatccttgtgatagcgcccttttatttttccttctatttttgtcaaatattttctttttcctttttttcctttttc

SEQ ID NO: 2850 - DNA, 289 bp, Glycine max
  Clone ID: 700556895H1
agaagaataccccctcttttgctgcatcagaggagttgtaaattaagagcatggctgcacaagctcttgtatcatcatcttctcttaccttctcagcggaggctgcaagacaaagtcttggaccaagatcactccaatctccatttgcttctccagaaaagcctcctttcttgttaaggcagctgctaccccccctgtcaagcaaggatcagacagacctttgtggtttgcatcaaagcaaagtctttcttacttggatggcagccttccgggtgactatggatttgac

SEQ ID NO: 2851 - DNA, 201 bp, Glycine max
  unsure (1)..(201): unsure at all n locations; Clone ID: 700556896H1
ttatcatttaactctgggtaatttcttgcttaaaaaagttccattacgcngtcctagtcaaatactagtngatccacatcagaganatcntttgatcccaccttccagaaggcttcccaatgggacttgggaatcctgtnnnncgnggtatcncatnanctnncagtgnngcctcntagnncccnaacaggngcctncngc

SEQ ID NO: 2852 - DNA, 292 bp, Glycine max
  unsure (1)..(292): unsure at all n locations; Clone ID: 700556901H1
cttaaacgcagttanaaaggcttgttgaagctgatgctcttaagatggaaattattcccaatccaaaggaagttgacggaataaaagttcttcagctggaaactgcagctggtgctgcaataaggttctttgacaaggctattgggattaatgttcctcgatcacgattccttcctgtgaaggcaacttcagatttgcttcttgtccagtctgacctctacactttggaagacggatttgtcatcggaacaaagctagggaaaatcctgaaaaccttctatgaactgggaca

SEQ ID NO: 2853 - DNA, 289 bp, Glycine max
  Clone ID: 700556902H1
gtgagctataagctagtttatcgtgaggagaatatgaagttgtttgttttctttgttgctgcagtagttttggtagcatggccatgccatggcgcaggctaccaaaggttccctctccgaatgaaaactggctatggtgagcgttcttcggaggtaaaatgcgcaagttttaggcttgctgtggaagcacacaacatccgagcctttaaaaccattcctgaagagtgcgttgaaccaacaaaggactacattaatggcgaacaatttagatcagactctaaaacagtta

SEQ ID NO: 2854 - DNA, 269 bp, Glycine max
  unsure (1)..(269): unsure at all n locations; Clone ID: 700556903H1
ttagccaacacaaccatcatggccaccttctgctattcagcaatcagcattacactggtcaaactgctctgaagcagctcaatgagttcgtccgcaagaccggtggcgccggcaaaggtcgcactaanatgcgccgnaccgtcaagantgctcctcagagcatttggtatggccctgaccgtcccaagtacttgggtccattctcggagcagattccatcatacctgaccggagaattccctggtgactacggatgggacatgctggat

SEQ ID NO: 2855 - DNA, 290 bp, Glycine max
  Clone ID: 700556904H1
gcgggcctttcctgcctagtgtttcttccaagcactctccaccctccatctctccatcttttggcttgaggagtctgaaatcgagctctttatttggagaatctctaagagtggcatccaaatcaacactaaaggtttcaaagacaaagaatacttcactcgtgaccagatgtgaaattggtgacagtctggaagaattcctcacaaaagcaacaccagataaggggttgatcaggttgttggtgtccagggagaagcattaagaacaatttccttcaaagtgaagacgg

SEQ ID NO: 2856 - DNA, 289 bp, Glycine max
  unsure (1)..(289): unsure at all n locations; Clone ID: 700556906H1
gagagctcttcctccctttctcacagcaatggccgccgcagcacgccctctcgtcaccgtgcaggccctcgacggtgacntggcaaccgatgcctccgccaccgttcccatccctgacgtcatgaaggcctctatccgccccgacatcgtcaatttcgtacactcgaacatctccaagaacagccgccagccatacgccgtcagtcgtcgcgctggtcaccagacctccgccgaatcctggggtacggccgagccgtctcccgtatcccccgtgttcccggcggcggaa

SEQ ID NO: 2857 - DNA, 289 bp, Glycine max
  Clone ID: 700556908H1
gtgagagaaagagatcacatagcagaatggcttctactcaatgtttcttgcaccaccatgctcttaccacccctgccagatccccatcacaacgcatcatggttagcaccaagcctaaccagcttgtttgcaaggcacagaagcaagaggatattgatgtcagcccaatctctcgccggttagctctaaccgtgctcattggtgctgctgctgttggctccaaagtccaacctgctgatgcagcttatggggaagctgccatgtgtttggaaagccaaagacagacaca

SEQ ID NO: 2858 - DNA, 289 bp, Glycine max
  Clone ID: 700556909H1
gtgaagatggcattgactacggcggaattgtgacggcggttatagcagctgctgcggtggtcaccatagtcagatgtttatttgctgccatggttgccatagccagatgtttatatgccgcaatgatcgccatagccagaagtttatatggcaacactaagcgacaacaagagtcattcgatgagcacgaagaaactgaggatgacgaagaatctgaggaggcagacaatgggaaatggaagaaacctgagagtggttgggtgaagctgaatgtggatggttcacgtat

SEQ ID NO: 2859 - DNA, 288 bp, Glycine max
  unsure (1)..(288): unsure at all n locations; Clone ID: 700556910H1
cctacttctacttccctttgttctcaaaccttatcccttatcctcccaaaaccaaaccatgtctacctccgcagcttctctcgcactcccaaccctcactctccgaactcgacaacctctctgttctccccaatgcttctcctcgtccctctccctcacccctaactccaaacccatttccatttccgccgttttcctcaaaannnnnnnnnnnnnnnnnnnnnnnnnnnnnnnnncgtctcgcttcgttccccatgtctctgtgttggagcaggaggaggacacttc

SEQ ID NO: 2860 - DNA, 287 bp, Glycine max
  Clone ID: 700556911H1
gatgacattatggataactctcacacacgccgtggtcagccatgctggtttagagtgcccaaggttggaatgattgcagccaatgatggagttctactaagaaaccatattccacgtatccttaaaaagcacttcaggggaaagccatattacgttgatcttcttgatttgtttaatgaggttgtacttgtacaaatgttgaagtttaatttatgtggatttcatcttgttaaaatgctaaagttgactatcatgcttttcttttaggttgagttcctgactgcttc

SEQ ID NO: 2861 - DNA, 265 bp, Glycine max
  Clone ID: 700556912H1
gggcttcaatggcatcttcacagctccttctgcaactcaagtttatcaccaaacccaacaatggtagaagaagctctcttcgccgtattgtattttgtcagaagcatcacgatgacacacccaccgaccaaatcaaccgaagttcttacttcttcacactcacactttctatttcctttctattgattattcgtaaccatcttctgaaatctcgttacatttcaattcttttgtgtattgaagagaatcatattgagaagcagcg

SEQ ID NO: 2862 - DNA, 287 bp, Glycine max
  Clone ID: 700556913H1
gcttcaacttgctccctcagaagcgaagaagaagccacagagaaccagtctcctactctctctcacccacaagaaaaatggcatctcacatcgttggatacccccgcatgggtcccaagagagagctcaagttcgctctcgagtctttctgggatggcaagagcagcgccgaggatttgcagaaggtggctgctgatctcaggtcatccatctggaagcagatggctggtgctgggatcaagtacatccccagcaacactttctcgttctatgaccactgctcgacg

SEQ ID NO: 2863 - DNA, 286 bp, Glycine max
  Clone ID: 700556914H1
ggagaatttgaaggaggctgtaatgcaatctgatagcaaggatggagcaaaggaaaaatttgatcctgagaaacacatagatgaatatctaccagtgcgggttaatgagcaaagaatgaccaacttattgcagtctctcctggttgctgtatcaatcttagccatgtcagttatcaaaaggataccaacctcagttctatggggatattttgcttacatggcaattgatagtctcccagggaatcagttctgggaaaggatattgctctcttcgtcacctcaagcc

SEQ ID NO: 2864 - DNA, 290 bp, Glycine max
  unsure (1)..(290): unsure at all n locations; Clone ID: 700556916H1
ctgtgacaccaaaaggattcatcatagggcttggttgaggtccatagccaagtgaagcttgattttgtgacatctgactcaactgattaaaagcattatcatactgcacaaatggatgtcgaacttgttgcaaattaaaaggcatcaagttaacannagaagttggaatactcctagcatacctttcatagttacgatcataatctggatcactgcgatcctttccctatctctcaagatggcaactcgagtagaattaatatccctaccaatagagcatntttgaataa

SEQ ID NO: 2865 - DNA, 286 bp, Glycine max
  unsure (1)..(286): unsure at all n locations; Clone ID: 700556918H1
tccgtcgtccctctcactcagccaccaccgtctcgctcaattccgagttggctattaaacaaaggttgggttgtgaaaaatgagtttgatatcccaaaacgctagcactaaaaatgtggtcaataagagcaagagggaggttgaagatgatgttgagaatagtgatactctnnnnnnnnnnnnnnnnnnnnnatatgacgagggggaacaattggcaatggaacaagtgaaagagatgaagaagcttgagaactttttgtttggttctttatattcccccttgagt

SEQ ID NO: 2866 - DNA, 287 bp, Glycine max
  Clone ID: 700556919H1
agaagagcatcactgaactaacaaagcaaccctatgtcgaaggtggtttgtgtcaccggagccagcggcgcctcggatcatgggtggtcctactcctcctccagcgtggttacaccgtccatgccaccgtccaagatatcaaggatgaaaatgagacgaaacatttggaggaaatggaaggagcaaagagtcatctccatttttttgaaatggatcttcttgacatcgactccattgccgctgccataaagggttgttccggcgtaatccaccttgcatgtcctaac

SEQ ID NO: 2867 - DNA, 283 bp, Glycine max
  Clone ID: 700556920H1
gcagcatatcttgttttacctattcttcttgtcgtttctcaatacgtttcaatggaaatcatgaaaccacctcagacagatccttctcaaaagaatcaacttcttattttaaagtttcttccactcatgattggctacttctcattatctgtcccatctggactaacaatttactggtttataaacaatgtcctgagcacagctcaacaagtatggttgcgaaaattgggaggtgcaaagcctgttgtgaatgaaaagcggtgggatattactgcagacgtgc

SEQ ID NO: 2868 - DNA, 276 bp, Glycine max
  unsure (1)..(276): unsure at all n locations; Clone ID: 700556921H1
cgcttcctcctccgncacttctccgacgccatgggcctctccggcctcctacgttctccctgcagtctttcggagcnatttatttgggggagaccttctgcagctanatcagtataaacaacagctccaattttgaagtcagagaagtccttatcaaggctganattcanacagagagacagagaatacttcttttagacacatcanaatcgccagttganacgatacgtgcgggtgggcgntagatttattgtagnncagatgtganagagctgg

SEQ ID NO: 2869 - DNA, 285 bp, Glycine max
  Clone ID: 700556922H1
ctcgggcaagagaggatactgagaaaattgaccgtgatgtcaaggaaaaagctagccgacttagtcatattgctactatattgaaggataaagctcagtccagattaaaaaatgctgctgatgagcattggagtgatggggccttagaggctgatttacgtcttgctgacttacgtgctaagcaacgtgcgatggaagatccccttatggccttggagcttatcaaaaacatccacaacaggatggtgagcaagatgtataactttccattcgcagagataaaga

SEQ ID NO: 2870 - DNA, 286 bp, Glycine max
  Clone ID: 700556923H1
gaagaatgtgaagcaaaagatgcgaaggatctttgccctgaagatgaggagaaaatggaagactctccagtcttaggtcttcttaaagaacaaaaaagggctaaacttgaaaccaaggatgataaaggcaatggaaccaaagtagttccaattgaggccctaattaagaaagctgttagaaaaagatcttcgtacatcaaggctaatgcagagaaaatcactatggctggtcttcgtcgactcttggaggaagatctaaacttgataatttactctggatccctat

SEQ ID NO: 2871 - DNA, 288 bp, Glycine max
  Clone ID: 700556924H1
tttgggagttaggttctgcacgctctgcttccagcgagtgttctttcttcgtttcaacaccttaatttgcacacgctgcttcttcagcttgagaaatggcacaagaaacctttctattcacatctgaatctgtaaacgagggtcaccccgacaagctgtgcgaccagatctctgatgcagtgctcgatgcgtgccttgaacaggaccctgacagcaaggttgcctgtgagacatgcaccaagaccaacatggtcatggtctttggagagatcacaaccaaggccaacg

SEQ ID NO: 2872 - DNA, 277 bp, Glycine max
  unsure (1)..(277): unsure at all n locations; Clone ID: 700556925H1
cgggnatcttatcaacatactggaggatgctattagaagtggacaccctatattgattattgctgaggatattgaacaagaggctttagcaactcttgtggtgaacaaacttagaggatcactgaagattgcagcactgaaggcccctgggtttggagagcgcaagagccagtaccttgatgatattgccatcttgactggaggtactgtaatcagagaagaggttggccttactttggacaaagctgggaaagaggttctcggatatgcctccagg

SEQ ID NO: 2873 - DNA, 284 bp, Glycine max
  Clone ID: 700556926H1
cttctgtgcctttctcttctttttttcttctctcattattcaccatctcttccaaaaatgaagttccaagattatgagcctccctctagcccaaaacacatgatcccaaaagtgaccttactagcaatcttggtcatactaatatttgccgtaacccctttatggtaccctttgttgagttactcttcacacttgaacatcaataagaatattccatcatcatcttcatcatatgatcaaaggcaagaagaaaacttgccctcaacatatgtggagagtgtgac

SEQ ID NO: 2874 - DNA, 285 bp, Glycine max
  Clone ID: 700556927H1
ctcaatttttctctcaaccggcccaatttagcataagcccagcatggccaccgcaacagcagcagccacctcgtccttcatggggacgcgcctcctggaggcccactccggggcggggcgggtgcaggcccggttcgggtttggcaagaagaaagccgccgccccgaagaaagtttccagggggtcgggctctagctccgataggcccctgtggtatccgggcgccaaggcgccgagtacctggatgggagccttgtcggagattacggattcgacccatttggg

SEQ ID NO: 2875 - DNA, 277 bp, Glycine max
  unsure (1)..(277): unsure at all n locations; Clone ID: 700556928H1
ccaaaaagaaaattttccatttaccattcttatgcaatcccaccctccaatcccacatttgtgcatttgttccattccaatttctaacttcccatgtacaatatccacctagcatagctataanatacacatcatttntcacccaacaacatcattcacatatctatacacaagatcgagngngagagagagaagcaaaaaaaacaacaaccttaatttgaattttcctatatcctatnatatttttctctccgaccaggccttttttgaggaggaa

SEQ ID NO: 2876 - DNA, 282 bp, Glycine max
  Clone ID: 700556929H1
gtgagaatgaaaatgttgcaggtggcaatagtgcaattggctgcgttgcaggtttttgttatttttttgagtggtggtgctgattacataccgccttcaaggttggatgggttcgtctaccaaaatgggtacttagatttggatactgttttgatagaagcgttttatgatccggtgtgcccatacagcagggattcatggcctccactcaaacaagctcttcatcactattcttctcgggtttcgttcctccttcatctcctcccttaccttaccagacaa

SEQ ID NO: 2877 - DNA, 284 bp, Glycine max
  unsure (1)..(284): unsure at all n locations; Clone ID: 700556930H1
gcaaaaatngcatcattcaccatgacagcttccatccttggcggcccagccgtcaccaaccggttggcagtagcaacgcagaggagatcactcgtagtgaatgctgccaaagctgttgaagcggaaaaggtcagttatgacaatgacatggatggtagcaatggaaggaggaacttgatgttcgccgcggcgcgcggctgctgtttgctctgttgctgggatggcagtggcagatgagccaaaaccaggaaccccagcagccaagaaaaagtatgctccgattt

SEQ ID NO: 2878 - DNA, 289 bp, Glycine max
  Clone ID: 700556931H1
cttgtgtaggacattaaaacacacacaagtacataaattccgattttctccctggaaaaatggcagcctctgccggcggccagataactctctcgtcaaccgtccagttacatggagtgacttgtaataggaattggaagcttgtgaagttctgtaatggggaagtcatgggacgtaagcttttgttaaaaaatggtggtggcagcactaaggattttaagcgccaacaacaacatatatgcatgtctctcaccgctgatgtgtccactgaatctaagttgagagacct

SEQ ID NO: 2879 - DNA, 294 bp, Glycine max
  unsure (1)..(294): unsure at all n locations; Clone ID: 700556932H1
gcagctagcaatggaaattactgccatggcttcttcagctactcctccacgaccttctcttccaactnccttccacttctccacacacagtagtcacnaccacctttagcaaacctcaactcagacgctctcacatagcactaccaacttcaaccaccatttcattgctcgctctcttcgcccctcccaaacgangccaaagcngctgtcagcatcgccaaggaccagattgtctcttctctcacccaagttcaggaaatgggttcgggtgtgctggacaggcacagcgtgttg

SEQ ID NO: 2880 - DNA, 290 bp, Glycine max
  Clone ID: 700556933H1
aaccctcccaacaccaacaagctcttcttctgcgacatcgagttcaaggagtcccagctctccttctcccagttcggcgtcaacgccctcccccacatccgcctcattgggcccaacatgggcctcaaggactccgagtccatggaccagggcgacttctcccgcctcgccgactccatggccgagttcgtcgagtccaagactaacctctccgtgggccccatccaccgcccccccctcttctcccgcaaccagctcgtcctcttaaccgtcttcatcctcctctggat

SEQ ID NO: 2881 - DNA, 284 bp, Glycine max
  Clone ID: 700556934H1
ttcccagtggaaaatacctctttgctggagtggttgatggaaggaacatctgggccaatgaccttgctgcttctctcactacattgcagggtcttgagggcattgtgggcaaagataagcttgttgtgtccacctcctcctcccttcttcacactgctgttgatcttgttaacgagaccaagttggatgacgagatcaagtcatggctagcatttgctgcacaaaaaattgttgaagttaacgcattggctaaggcattgtctggcaacaaggagtggccttct

SEQ ID NO: 2882 - DNA, 287 bp, Glycine max
  unsure (1)..(287): unsure at all n locations; Clone ID: 700556935H1
ccaattcaagcgtgcataggatcaaaagtncatcgctagtgaagcgatatccgcaataaggaaggatgtactagccaaatgctacggtggggatatttcgagaaaaaagaaattgcttaagaaacaggctgaaggaaagaaaaggatgaagtctattggtaaagttgatgttccccaagaagctttcatggcagttttgaaacttgaaaaggaggtaatatgatcgtgtttacgtgtaagttgcaacatgatatgaattgtaaatatattaagaaaatattagaacc

SEQ ID NO: 2883 - DNA, 268 bp, Glycine max
  unsure (1)..(268): unsure at all n locations; Clone ID: 700556936H1
ctcggaatcaaatcaccatcacaacacttccgatggggnctcccagcnngtcaacagcccgcgtttctcgggtccaatgactcgccgcgcccactccttcaaacgtnnnnnnnnnnnnnnnnnnnnnnnnaccgccgccaccacctcccacggcggcgcggcggaagtggcgccggcgaagttgagcttcaaatcaactcgcccagatcggaggaagcgtcggagggagttccggtggggaagcacagccaccatcacgtgatcagag

SEQ ID NO: 2884 - DNA, 285 bp, Glycine max
  Clone ID: 700556937H1
tgagaaggtcaaggggaaagaagatgatggggaggacaatgaagagaatgatgatggggagctgagttttgactatggacaaatcgaacaagaccaagatgtttctacatcacgaaactcaatggagttggatcaggtggaacttacacttcctagagattctacagctgaagctgctaaggaaaacttagacaaccttgtaaggaatttgttttcctcaaggttagggcagggagccaatctgccccactttttgctgataataaaccagatgcaagtgaaaaa

SEQ ID NO: 2885 - DNA, 284 bp, Glycine max
  Clone ID: 700556938H1
ttggaacaacactgtacttgtagatggtaatgctggtgccaagttccaagtaggaatagcaacgttcccaaatgttggcatgaatttagcgatgcaaaaaattgaagaggaaattcctttcccccctggaactgagttaacagaaatattggacattgagctcccacctgaagatattgggaacgcattgcagcttttagagttttgcagagtgtttggaaaggctcttgatctcaagaagggagaagcgatgccatttacgagattagtacgtaaacaaaatt

SEQ ID NO: 2886 - DNA, 286 bp, Glycine max
  Clone ID: 700556939H1
ggctgcgcgggataattgtgatcactcatcaaattaatatttttttggtaccaactcatcaagttatttgtttttttggtacaaacttatcagattaatttgaaactagcgtcacttgattgtaccatttgttttctggaatgaatcctttctcatgaagtgataagattatgagaagagaggtagatgcaaagcccttaaatagtaacttgaaacttttgtttataaggtcaacttatttaagattgccttagttggatgtttctttattcccttgaaaaatatg

SEQ ID NO: 2887 - DNA, 287 bp, Glycine max
  unsure (1)..(287): unsure at all n locations; Clone ID: 700556940H1
aaacacacgcagagtttaaaatggctctgcgcaccctctcttcgctgcaatgaagaaacgtttttntntncttctccgaagangaaaaatggacctcggcgacgatgcgcagancantctcactctccctcgtncctcgattcccttctctgcgaagagcgagaaacgttcgaggaagactttgacgcgaacggtgacgagtgcgagaccgaaaacaacgacccctctgtgataaagtcgcaacctttgcccttggttttgtacgacaatgacctgttctgggaaga

SEQ ID NO: 2888 - DNA, 286 bp, Glycine max
  Clone ID: 700556941H1
atcagactccaaaacagttaaccaacaagcttacttttatgccagagacctcgaagtccatcccaaggacacatttgtgttcagtatagatggcaccgtactctctaatattccatactacaaaaaacatggatatggggtggagaaatttaactcgaccttgtatgatgaatgggttaacaagggcaatgcaccggcactgcccgagactcttaagaattacaacaagctggtgtctcttggcttcaagattatattcttgtcaggaagaacactggacaaacag

SEQ ID NO: 2889 - DNA, 77 bp, Glycine max
  Clone ID: 700556943H1
gaaaaatgaactgattagctgcatgctcatgttatatttaaataccctccaagtgtgatgatattgtaatatataat

SEQ ID NO: 2890 - DNA, 283 bp, Glycine max
  Clone ID: 700556944H1
gtaaaccacaaaaagattgatcccaccaccgctgaaactagttttcttggcaaagtcatgaactttttgtggagctcatctgggtctggatacgaacatacttggccagaaatagaatttgggtggagaataataacgggtacgataattggattcgtaggatctgcattcggaactgtgggtggtgttggtgggggtggcatctttgtcactatgctctcccttattattggatttgatgcaaaatcagctactgcaatctccaagtgtatgattacgggtg

SEQ ID NO: 2891 - DNA, 282 bp, Glycine max
  Clone ID: 700556946H1
gtagaaccttcactctgctatcccccatattcctgtgtttcctttgaaaaaaaaagaagaagaaaaaacatgtctaggttttttggattcttctttgtgggtcttacgttgatgttggtcggtgtggcaaatgctatggctaactcttccaacaaatttgatcaactcttccaaccaagttgggcttttgaccactttattcatgaaagggatcttctcaaactcaaacttgacaaattttccggggctggttttacttccaagagcaagtatagtttggga

SEQ ID NO: 2892 - DNA, 285 bp, Glycine max
  Clone ID: 700556947H1
attaaggatcatgcctttgtggcatcagaatatccagttgtaataaccctagaagaccaccttacaccagatcttcaggctaaagtggctgagatggttacccaaacatttggagacatactatttactcctaactcagaaagtgtgaaggaattcccttctcctgaatcacttaagaagagaattattatatcaaccaaaccacctaaggagtaccttgaggcaaaagaaaaggaaaaaggggatgattcacagcacgaaaaggagaaagggatgattcagagc

SEQ ID NO: 2893 - DNA, 283 bp, Glycine max
  Clone ID: 700556949H1
caagattgttggaagcaaaggaaaggccataggcattgatcgatttggagcaagtgctccagctggaaaaatatacaaggagtttggtatcaccaaggaagctgttattgctgctgccaaagaactttcgtagatatatttgttgagtttcttttatctcatctagaacttgtggttttcacttgtggctttgggttactgttacatgacttgttttttgagatatcactttagccacaataaggaagattagatgttctgcatatgattgtcagaggaacca

SEQ ID NO: 2894 - DNA, 279 bp, Glycine max
  Clone ID: 700556950H1
cttcgctccaatggctttaggctccttcgatcgctgcccgaaaaactcctccgccacgccaacgaacccatatatgatggagtgtgccaaaggggttataggacattgagttctggtctttgtaatccatccagagttattgggaatttttctccaaatgttggaaatggtgttaatttgaagaacttgttgctttttggagccgcggatacatattgggggacatctagatccgttcagggtcagcatcatggcaaggactattacgaatgcttggtg

SEQ ID NO: 2895 - DNA, 96 bp, Glycine max
  unsure (1)..(96): unsure at all n locations; Clone ID: 700556951H1
gcgtgctggtgcctcctgctactctatattcantcttccngcttcttngtaatntgnngncnaacaacaaancaacttgcactncctggttttttt

SEQ ID NO: 2896 - DNA, 74 bp, Glycine max
  Clone ID: 700556952H1
gggaggcaggtgagagagataaagaaggaatacttataataataaatgaaaatgaagaaataatcttacggtgg

SEQ ID NO: 2897 - DNA, 273 bp, Glycine max
  Clone ID: 700556953H1
ctcaatttttctctcaaccggcccaatttagcataagcccagcatggccaccgcaacagcagcagccacctcgtccttcatggggacgcgcctcctggaggcccactccggggcggggcgggtgcaggcccggttcgggtttggcaagaagaaagccgccgccccgaagaaagtttccagggggtcgggctctagctccgataggcccctgtggtatccgggcgccaaggcgccgagtacctggatgggagccttgtcggagatacggattcg

SEQ ID NO: 2898 - DNA, 286 bp, Glycine max
  Clone ID: 700556954H1
gcatgtgcaaccattagccaataaccaaaccccccaacacacatatcagaacacacagcacaacacagttcaagtttctcgtttccctaaacagatcctaacaacggaacacaaacacggagaaacaaaaatgcacgcaaagacagactcagaggtaacaagcctcgccgcgtcttcccccacgcgctcccctccacgccgtcctctttactacgttcagtctccctcgcgagattctcacgacggcgagaaaaccgcaacgacgtcgtttcactccacgcccgtt

SEQ ID NO: 2899 - DNA, 97 bp, Glycine max
  Clone ID: 700556955H1
attgccttctcttttgcagcagggtatcatagagatgaataacgagtttgattgatctgtcacgtagctacttcacgtgaccacttgtcgtactcat

SEQ ID NO: 2900 - DNA, 283 bp, Glycine max
  Clone ID: 700556956H1
cactcattctttggtgttggatatgttgctggtgtactttgtgcaattgtgtctcatcctgctgataatcttgtctcttttctgaacaatgcaaaaggagcaacagttggtgatgcggtgaagaagcttggtttgtggggtctctttacgcgtggtctccccctccgaattgttatgattggaactcttactggagcccaatggggaatatatgatgcattcaaagtcttcgtcggattgccaaccactggtggtcctgctcctgcagctgctccagctcctg

SEQ ID NO: 2901 - DNA, 285 bp, Glycine max
  unsure (1)..(285): unsure at all n locations; Clone ID: 700556957H1
gggaaggacaagaatagancccgtccaaggctccgggaagggaagagagaattttgaatattgaatcgaaccgcagcaaataagcttcaccgtaacttcgtggaatcaaagctattaagttcccaacaccacaatttaaaaagcaaggccttcgcagttgttttcaccacaacaaattctancccaattccaaagannnnnnncatgaggctattganggttgnnacatctaatctgaaccaatgggcgatggacttcgattgcaacgccaagcaaatcaaagag

SEQ ID NO: 2902 - DNA, 280 bp, Glycine max
  unsure (1)..(280): unsure at all n locations; Clone ID: 700556958H1
gtggtgtacaccgtcatgtcccggttcccctgcgactccctttaccgcatcaatatttttctctttggaaacacaccaaccatatcttctcttctctttgcattcattttctttcaccctcacaattttnatttttttatccaancacaaaattntganaatataagantttcaattgaagtatttgaaattcttattaaattctctcatccaaacacactcttaaggtaattattacaaaagtnaactatcttaccttgaaatttaatatagaataaat

SEQ ID NO: 2903 - DNA, 282 bp, Glycine max
  unsure (1)..(282): unsure at all n locations; Clone ID: 700556959H1
taacaatattattctcctcattccttcatttttaaacctagctccatctccctccactcaccataacatggcatcagaagcaaatgctgccaacaccaacttctgtgtaaatgttagcaacaatggctacattagtgctaatgaccccttgaactggggtgcggcggcggaggctatggctgggagccacctcgacgaggtcaagcgcatgctagangagtaccggacgcccgtcgtcaagctcggtggaganncnctgaccatctcgcaggtcgcggcgat

SEQ ID NO: 2904 - DNA, 156 bp, Glycine max
  Clone ID: 700556960H1
gttgaagccaagaaacattgaaagtaactggaggatgaagcctgagagatggagacaccccttgttaaggcctctttgacatgtacagattttggctttgaagttaacaagagactgaacaaaaataatacagaattatgcggctatttttccctc

SEQ ID NO: 2905 - DNA, 281 bp, Glycine max
  unsure (1)..(281): unsure at all n locations; Clone ID: 700556961H1
ggtactcgtaattggctacatagagttccagaggaatgcagagctcgacccagagaagaggttgtacccaggtggcagttacttcgacccattgggcctggcctcagacccagagaagaaagccacccttcaattggcggagatcaagcacgcccgtcttgccatggtgggcttcttgggctttgcagtccaagccgccgccaccggcaagggcccgctcaacaactgggccacccacttgagtgacccactccacacaaccatcattgncaccttctcat

SEQ ID NO: 2906 - DNA, 282 bp, Glycine max
  Clone ID: 700556962H1
ggccaattcagcttgctttggattgatcagcagcaacgcctgaaattcaatgttgatgttgtagagagtgaatggggccagggtgctaagcttgatgttctggaatcaaagattgcttcagatacttcacacactattaaggcaatttgcattgtccacaatgagactgcaactggggtcaccaatgacttggccaaagtgagacaaattctcgattcctaccggcatccagccctccttattgttgatggagtgtcttctatttgtgctctgatttccgca

SEQ ID NO: 2907 - DNA, 287 bp, Glycine max
  unsure (1)..(287): unsure at all n locations; Clone ID: 700556963H1
gcagagaagttaacaaccaatggccaccatcattgcttcttcctcatccactgtgctcttctctgcatcctcttgcctacctcctcccattttcacacccttctacttcgcgcctttctttctnnnnnnnnnnnnnnnnnnnnnnnnnnnntctatcaatttctccttcttttttatcatacacttcttcaaattctacacactttgccactcatgctgccttcagcatcagtgccagcgccgccgagaagaagaaggtgctcatcgtcaataccaacagcggcggt

SEQ ID NO: 2908 - DNA, 288 bp, Glycine max
  Clone ID: 700556964H1
gggaggatctctcaaacatgacacacacagttgctgatatcgaggcttgtatggctggtacttgcaagaccgtggcagattcttatgggtttttcaagaataatgccaaggagcagggttggacgatgtcagaatcacatctaaatcctggtcgagcacggcttcatccagttgataataatagatgatattctcagctttcggcagctgggttttgactgtcaaagttcttgggactgctctggatgtgaatgagtcgggcaactgaagcttaaaattaccaaaagg

SEQ ID NO: 2909 - DNA, 283 bp, Glycine max
  Clone ID: 700556966H1
cagcaatgcctcttgcaccactaactgccttgcaccctttgtcaaggtccttgatcagaaattcggtatcatcaagggtaccatgaccaccactcactcctacaccggtgaccaaaggcttcttgatgcgagccaccgtgacctgaggcgtgcaagggcagcagcactcaacattgtccccacttcaacaggagcagcaaaggcagtggcccttgtcctcccaaccctcaaaggcaaactcaatggcattgcactccgtgtgccaacaccgaacgtctcagtg

SEQ ID NO: 2910 - DNA, 283 bp, Glycine max
  unsure (1)..(283): unsure at all n locations; Clone ID: 700556967H1
gtattctcagtttgtgaattgaaatgatgtcatcaactatgttctaaattcaccaacccaacgtcttgtaagctccgcccctggacaaaatcaaggtcccatttatgcaagctttgattcacattcctgttcgtttttccttcgcaccttttcttctncttcgctccgtgccatgtcttcctctctcgctcttccttccactcccttcttcgccaatggaacaagaatcttcgctctcaagcactctctccctcgctctagggtttccatgagcgtctccgct

SEQ ID NO: 2911 - DNA, 273 bp, Glycine max
  Clone ID: 700556969H1
cttggatgaaggggctttctttgtcactcaggctggttcaatggagctgtcacagttctttgatggcatggacgacgatggaaatcctcgaccaactggaccattcagcaagaaccatgagaatggcagaaagccagcttttgacagccatgttttagagatgaggaagttgcagccttcccatgacacagtcgtcattaatagagatgttaagagtcagcaacaagcaaaggaaaacaaggctgctgtcatgcctgtgaggccaaataaacc

SEQ ID NO: 2912 - DNA, 282 bp, Glycine max
  unsure (1)..(282): unsure at all n locations; Clone ID: 700556970H1
gtttgctgcacccatcaatggcaggcgtttctctcaagtgcggtgactgcngtgctctgctgagaaccgtagaagaagcgcaagagcacgctgaactcacctcccactccaacttctccgaatccaccgaaccggttctcaacctcatctgcaccgcttgctccaaaccctgccgatccaaaaccgagagtgatttgcacacgaaaagaaccggccataccgagttcgttgacaagacttccgaggccgttaaaccgattagtttggaggctccgaagtggg

SEQ ID NO: 2913 - DNA, 281 bp, Glycine max
  Clone ID: 700556972H1
agcggagatagcaatctcatctcattcatttcaatggcaactcaaggtcaagtcattacctgcaaagctgcggtggcctgggaacccaacaagcccttaactgtccaagacgttcaggtggctccgcctcaggccggcgaggtccgtgtccaaatcctcttcaccgctctctgccacaccgatgcttacacttggggcggcaaggatcccgaagtctcttcccctgtattcttggccatgaagctgcaggattgtggagagtgttggagaaggtgttacta

SEQ ID NO: 2914 - DNA, 283 bp, Glycine max
  Clone ID: 700556973H1
gttttgtcatctaagaaaacctagtgagagtaagcacacattgatcagcaacaatggcagcctactcaagccatgctttgaaaaccatccctttttcttcctttgtgaagcctgtcagtaccaaaccaacatcattcttcacaccttcacctaccaaacctttcttacccttcacctcaccaaaccactctctcaccaaaaatctcaagctgaactccactttgccacacttttgcttgtcttcagttcccaagaaatctttcacttgtagaagccaggctga

SEQ ID NO: 2915 - DNA, 269 bp, Glycine max
  unsure (1)..(269): unsure at all n locations; Clone ID: 700556975H1
catgcttctgtgctcgcccttgtattccttcttgtcatactatttcaggaaggattggtaacatgtatgaagaatgaagacggatcagaagaatggggatatgtgcaagttagaccaaaagcccacttgttctggtggctttacagaagtccatacagagtggagaatccctccaagccttggccaatcattctctggcttcagggaggaccaggctcttcaggagttgggtttggaaattttggagaggttggtccttcnccgctaat

SEQ ID NO: 2916 - DNA, 281 bp, Glycine max
  Clone ID: 700556976H1
agataatcaaacaggtcttagccagtcaaaggaaaaggatgaagtgcctaaggaaagtattgttggatcacggaagtctagaaaacatgctaaaataaaattagattctgaatttggagttgtaaggggaattgactttaaaaatgtatacacggttataaactttgaaatgcctcagagtgttgcaggatatgtacatcgaattggacgtacaggaagagcatacaattctggtgcttctgtctctctggtttccacggatgaaatggatactttagaag

SEQ ID NO: 2917 - DNA, 279 bp, Glycine max
  Clone ID: 700556977H1
ccaatctacaataaacgatgattctcattatctccctcattttttctcttctctctttctcccatgcttctgtcctagatttctgtgttgcagattatgcaggtcctattggacctgcaggatattcctgcaagaagccttcaaaggtcacagcagatgattttgcttacagtggccttggcattgctggtaacacctcaaacattatcaaagctgcagtgacccctgcatttgatgctcagtttgctggtctcaacggtcttggcattccgcagcacg

SEQ ID NO: 2918 - DNA, 281 bp, Glycine max
  Clone ID: 700556978H1
gtttccgaaggcttgtatctaggacacgaagtgctttcaatttctattcctatggcctccttggaatcatatgagaaagaaactagtcttgtgggacatactggtccactttgtagtgtgagaaaaaccccctttgtgcagatgagtggtccactgtatgctaccaatggaactggaaatctttcacgacagaatatagttgcgacacgaaccaaagtagtggagagcaagacagaaaagttttctactttcaatggcacagatgaaaatcgttgggataa

SEQ ID NO: 2919 - DNA, 281 bp, Glycine max
  unsure (1)..(281): unsure at all n locations; Clone ID: 700556979H1
cttgtttttcatttttactttttgggcctttgaaagcttaaanacctaaacgcccaagactcaaaacaaggcagaaccgctcaactgcgccgtgaaactcttcttctcattcacattcagttgcgcgaanaccatcaggtgtgttcagttgctctgttttatgcaactctgtttttttggttccgcctaggtaggtgttcatgtcttgtgttttggactttcggtactaagagtaggcactaagcattactgcagtattttaagttgttttgtttcctttt

SEQ ID NO: 2920 - DNA, 144 bp, Glycine max
  Clone ID: 700556980H1
gtgatagtgaaataatgtttaacatgcggtttctttcaattgttgcaacttgcaaatatagcacttctacttaaatgttatcatgtactttatgtaacgcctaaattagttcctaaatcaacctacctttcagtttcaaaaaaa

SEQ ID NO: 2921 - DNA, 278 bp, Glycine max
  Clone ID: 700556981H1
acgaaaccctcttcatcttgttctatctgtgacgagcatcatggcctcaagagcagtgttattgttggctatgtgtgtgcttccggcgatggttgtggccattcgcccagcaaagaaccctttttgcgtgaagggtcgtgtctactgtgacccttgccgtgctggttttgagacctcagctaccacctacattgctggtgctgagattatgttgcaatgcaagagcagggttagcaacgaggttgtgtacagaagaaggggtacaccgactcaaccgg

SEQ ID NO: 2922 - DNA, 279 bp, Glycine max
  unsure (1)..(279): unsure at all n locations; Clone ID: 700556982H1
gaagaagagaacagaatanggnngtnctggtcaaattcataggttggatcttgaatctgggaataaactcaaaaacccaacctatgaatttgaccaggacctccctattctgctcaggtccaagaagaagagaacagaacagctattcggttctgtcagttcaagaaattctccaattgaaataattgnngtataactcttaactcatcactctcttgtatattttatattagttaatatacataaactcttggggctattatttcatactataacatt

SEQ ID NO: 2923 - DNA, 281 bp, Glycine max
  Clone ID: 700556983H1
ctgaaacgacagcattttttgatctattatggtgaaggggttgcacgggcagaacctccccgcccacgtggcacagctggttgatcagctggagcgccactgcttcgctcccgatggatctctcatctccaagcctctcttcaacgatctccaactcgccagagatgaaatgtgcagggaaagactgcgttacctggaagccatggctatatattctgaggctattgcaatggtggaggagtatcagcaagccatttctgtgtctaaccttggtggaatca

SEQ ID NO: 2924 - DNA, 281 bp, Glycine max
  unsure (1)..(281): unsure at all n locations; Clone ID: 700556984H1
gatttccttctctataacacaacgctctcttctcttgcaaccaaagtacttgntccagtgtctactgctactcaaaaaggatttgggacatcatgtgcagtgattcgaaaagtaaactttcttccccaaccctcgtcgtcatggagaatagtaacattcagaagcagaatctggatggtctctacaactcggttttgcttgaattgtctgcatctgatgattagaagctttcaaaagagaggtggaggaaaaaggcttagatgtgaacgaggcaggctttt

SEQ ID NO: 2925 - DNA, 270 bp, Glycine max
  Clone ID: 700556987H1
cagaaagcaagctcatcctagagttttaaaaatggcagcagcctcctccatggctctctcttccccatccttggctggcaaggccgtgaagctgggcccatcagcccccgaagtcgggagggtcagcatgaggaagaccgtcaccaagcaggcctcctccggaagcccatggtacggcccagaccgcgtcaagtacttgggcccattctctggcgagcccccgtcctacctcactggcgattcccaggtgactacggctgggacatgctg

SEQ ID NO: 2926 - DNA, 281 bp, Glycine max
  Clone ID: 700556988H1
aatggtttccattcagagccatatacataaaatttgctacattatttttaacaatgaaatgggttcattacaggggcaatacaggttgagaggaattctattctactccaagggatacatatgactcttatacaggggataacagcacaacaaaaacaaatggtgctcagaagataaacttgacttgatacctgctaacaccactctattcagttccagtaattttcttcttcagtgattcaatgtctgtagctagctccttcctgctagacttaaacaga

SEQ ID NO: 2927 - DNA, 278 bp, Glycine max
  unsure (1)..(278): unsure at all n locations; Clone ID: 700556990H1
gtttctgaggtgaccgagcagcttcttcaaatttcattttgaagttggtcaattcgattgacgcgcggggcatggtaaggcanattcaacttcacgccgccacgattggtttggtttgttgagattacattaccaaaactattcgatttggacatttcttactgtgcatgtttcataggcatttaaattgcatctccacacttctattgcaanatcaatactacttatttttcctttcccgtgtaatgtgattggtgtggttggtgttnntcagaatt

SEQ ID NO: 2928 - DNA, 278 bp, Glycine max
  Clone ID: 700556991H1
tcagtacaaaatttgatggatcttctatccttaagagatgtagttccaatgccaattctaggaacgttgactcagaacgagccaggtttgattccaactggttaaaccgttggatggaattagataacaagagcagccaaactggagatgcttcattgaaaaatggacgccctgatgatgataaaagtgacaagattctcgaagtggatacttggaggccacacttcaagtctcaccacagtagcagctccttccaagcagcacattattatttgagt

SEQ ID NO: 2929 - DNA, 279 bp, Glycine max
  unsure (1)..(279): unsure at all n locations; Clone ID: 700556992H1
aagcaattcacgttggaagctgatacaaataagccaacaatacctgctgagggtaaatcagcacccaggataggatgcataggacacttaacccgtatatctaacaaacttgtccagttagggaataacaacagtgtgattcaggaacatttgcagggnaatagtgaatggaaagattggtacctgantgttttatctaatcgcaatgctgtggaaaatgtctatcaatggtcgtgtgggagaccaacagcgttgcatgacaganatagggatagtgac

SEQ ID NO: 2930 - DNA, 278 bp, Glycine max
  unsure (1)..(278): unsure at all n locations; Clone ID: 700556993H1
cgggaacacacaaactcgtaggaatgtctgtgtctttctcttcaacctcattcgcattccaaagaccagcacatctttgctcaanntcactcaccgttgcatccaacaactttgattcggtaccaggtggactcggtcgtcttgtgctgaatgttagaagcaccagcttgtgtcgaaggtttcgtggcttgaaactgtgggtacttgagagactcaacttccaattccagccaccaaagcaacctaagaatagaaatcatcacttcaaaaataatttg

SEQ ID NO: 2931 - DNA, 279 bp, Glycine max
  Clone ID: 700556994H1
tagaagaataccccctcttttgctgcatcagaggagttgtaaattaagagcatggctgcacaagctcttgtattcatcatcttctcttaccttctcagcggaggctgcaagacaaagtcttggaccaagatcactccaatctccatttggcttctccagaaaagcctcctttcttgttaaggcagctgctaccccccctgtcaagcaaggatcagacagacctttgtggtttgcatcaaagcaaagtctttcttacttggatggcagccttccgggtga

SEQ ID NO: 2932 - DNA, 282 bp, Glycine max
  Clone ID: 700556995H1
gttcattccaagaactaaagggggacttctgcggcaatatccaagttgaattgagaaatggctcgcaaaataggccatgcttgtctttattaaattttacaagcagcactcgatcagtgaggatggcataaagaaatgtttaccatctgttctgtttattaatctacaattcagcttcgaaaaccctgagaaatattttcactgtgatcatagtcaagatcttctccggaagatccctatgttgattctgcggtctgatcaatactatgtcccatctatgtt

SEQ ID NO: 2933 - DNA, 284 bp, Glycine max
  Clone ID: 700556996H1
ctttgattccatttctcattctcacttccaaaactcctccattcatttctcgcatttctaccttccaaagctctttctctaagatcgagctttggaaaacttgaggaagcatttgagtaacaaccccttttcagatccctgaagggttgtgttcatttgtcgaaataataacaacttgcttggaacaagcataataagcatggcaagcgcgttgcagcttcagggggttcaagggaactacctttgtgtgagtgtgaggaggggcttgcatcattgcaagcctc

SEQ ID NO: 2934 - DNA, 275 bp, Glycine max
  unsure (1)..(275): unsure at all n locations; Clone ID: 700557002H1
agatggatcagtttttgtggagggtgttgcctttgcttacaatccttgtttcctttggagtgttcttctacttgcaggattcttacacagcacagttatttcctctcataaagttaccgcgggataagtgcagccttcttccccatcgccacttctggatatccagcaaacgtattgtgaccccacaagggatcatttctggttcagtggagataaatgntgggaaaataatatctgtcgttgagggacatgctatccaggggaagcctaagcaa

SEQ ID NO: 2935 - DNA, 274 bp, Glycine max
  unsure (1)..(274): unsure at all n locations; Clone ID: 700557003H1
atggagcaaccaaggaaataggaagggcagcagtagtggcagtgactaaggccagaggaatggaggttgcaggagcggtggatacttgtcatgttggggaaganattggaaagattgttttcaattcttctagatatgtggcatggaagagccccttgaaatacccataataaatgaccttactatgattttgggctctatatctcagtccaaggcagcaggagttgtagttgatttcactgacccttcctcngtatntgacaacgtaaaacag

SEQ ID NO: 2936 - DNA, 94 bp, Glycine max
  unsure (1)..(94): unsure at all n locations; Clone ID: 700557004H1
anaagtagatggtccagnttagtaccacaaaaatngagtcntagaatanctgantatgcgtatagctacanccntanagatttangccaaatgc

SEQ ID NO: 2937 - DNA, 272 bp, Glycine max
  unsure (1)..(272): unsure at all n locations; Clone ID: 700557005H1
aggctttttgaacgaggattagcttatgttggaacagattatctttcttttcccctctgggataaatacattgaatatgagtacatgcngcaggactgggcctgccttgctgtgatctacaccagaatattagagaatccaaatcaacaattagatcggtatttcagcagcttcaaagagttagctggaaatcgtcctttatcagagttacgaactgctgatgaagctgctgcagtggcaggagttgcttcagaggctactggccaagctac

SEQ ID NO: 2938 - DNA, 273 bp, Glycine max
  unsure (1)..(273): unsure at all n locations; Clone ID: 700557006H1
caacacagcaacaccaactganacatctncatcatctacgngngaccataaattttctctctatccctttccctctctctgtctgtgttttnncntnaaaaattctgtgagangcatagaggaagatgaaggaaagcagtnatgggtttgtgagagcggatcagattgatctgaagagcatagatgaacagtngganaggcacctcagcaaggtgttgaccatagaaaaganaaagcgctctgaaggggaagnngatgctgatcatgttcatc

SEQ ID NO: 2939 - DNA, 274 bp, Glycine max
  Clone ID: 700557007H1
aaagaaatgggaagttcattggtggatatccaagttcccgggcagaagtttgtgaacggagttccgttccccgctgtggtgtctcctccacctgcaactgcaagtgcggttcctcttacggactccgtcaaaacccagaaagctttccttgaatcattgctactccaatcgggtgctgtccttttcaggggattcccactctccaccgcttctcacttcaacgacgtcgtcgaagcattcggctacgacgagcttccctacgtgggcggcgccg

SEQ ID NO: 2940 - DNA, 275 bp, Glycine max
  Clone ID: 700557008H1
ctcagactcagaaaagagaagaaacaaaacaaaaaagagcagagagagagaggaaccatcaccaaccctaatttcttagctaaaccctattcgtttagcatttcctctcttttctcccactcgtaaatcctctcccaaacttttcagatccaaataaatcatggttttctgggtttttggctacggttcactggtgtggaaccctggattcgattacaatgagaagattataggtttcattaaggactacagacgcgtgtttgatttagcgtgca

SEQ ID NO: 2941 - DNA, 262 bp, Glycine max
  unsure (1)..(262): unsure at all n locations; Clone ID: 700557009H1
ggctgaacaaatacggagattttgagaaagtgttcgttgccggcgacaggccggcgccaacatcgcgagctatttgggcattcgggtcgggttagaacagttacctnctttgaagctagaaggggttgctttggtgcatccttatttctggggcacggagccgctggagtgtgaggcggacgggcagaaggcactgccaaggtgcaccagttgtggcgatttacgtgccccaccacgacgggatccgacgacccgattatca

SEQ ID NO: 2942 - DNA, 272 bp, Glycine max
  Clone ID: 700557010H1
aaaaaaaaccctctctttctctctcttccaaaacctaattttcattttttctcttcaaacaaattttacaaaatgcgtgagatccttcacatccagggtggccaatgcggcaaccagatcggcgccaagttctgggaggtggtttgcgcggagcacgggatcgaccccactggaaggtacggtggggactcagagcttcagctcgagaggatcaatgtctactacaacgaagccagctgcggccggttcgtgccgcgcgcggttctcatgga

SEQ ID NO: 2943 - DNA, 272 bp, Glycine max
  unsure (1)..(272): unsure at all n locations; Clone ID: 700557011H1
ctgagtcacacgctctgatcttcatgaatctaggaacctgcgccgcgggtgcaccgtaccgttgggtgcaccttactccctcacgaaggaaagagaagatgtgcgagtgtgagagtgagagcgaatgcgagtgttggaggaggaaaaggagatggcgaaacggcgtcgtatttggacatgtggaagaaggcggtgnnnnnnnnnnnnnnnnnnnnnnncttcaactcaatagcggaccgcgtggcgcaaatactgatgacaacaacgacgac

SEQ ID NO: 2944 - DNA, 271 bp, Glycine max
  Clone ID: 700557012H1
attagaaggtactgagaaggctatggaacaggctctgaaagaagggatagttggggaggcaggaccattgaaaagaaacatggtctctaaagtgccagaaaaggaaagtactgacgagggtggtcctggaataaaggaattcaatgatgcaaattactggagggttgaccaggaggttgctgttctagagtgacggatagtaactcttgcttgtttgtatcaaaagttagaccaacaccagtggaccctattcttggttcgcaggagcgac

SEQ ID NO: 2945 - DNA, 270 bp, Glycine max
  Clone ID: 700557013H1
gatggagaagtgttcctgagtttgcctgcacttgttggtagaggaggggttctgagtgtgaccaatgtgcacttgaatgaagaggagacacagaggcttaaggactctgccaagaccatccacgaggtgcagactcaattgggtatttgaattttctgtgatggtcacgtggatatccggttactgcttttttgtccttaagttttcttttgttcttctccccatgatgatatggtttgacctaaattattagtacttgctgctgttagt

SEQ ID NO: 2946 - DNA, 270 bp, Glycine max
  unsure (1)..(270): unsure at all n locations; Clone ID: 700557015H1
gaatgacccttcacaggtttgggaacacttcctcttcttcgctgtggtatgagctcaactacattgagtccaagggaaggatgaagaagggtgatagggtgtggcagatagcgttcgggagtgggtttaaatgcaacagtgctgtgtggaagtgcaacagaagcattaagacaccggttgatgggccttgngctgattgcattgatcgttacccggtccatattcctgagatcgttaagctctaggatggagaattgttcaagaagataa

SEQ ID NO: 2947 - DNA, 275 bp, Glycine max
  unsure (1)..(275): unsure at all n locations; Clone ID: 700557016H1
ccaagctgcacaaattaatatccaacactctcaagctttccactttcaaactctgnacgctcaatttgctttatctttccgaggtaatttcttttnctttctntctgaactcaaataaatttctaatgaataccccatgcctctcatatctctatgtatctgtnttccctttctttgcattccatcntccaacgtcggngcttgtntgaattaaacatatttctctgtatctgtnttctgtctntntcttttttaatattcctgtttgtgttaat

SEQ ID NO: 2948 - DNA, 252 bp, Glycine max
  Clone ID: 700557017H1
aatggctgatcttggacctaatgaggttaccgatgaagaggaggatggtggaagtggggactcagaaaatgaattttacaaacaagtggaacaactgcgagctgcaaaactggcagcaaaagctgagacttactcaaggaactcttcagtctcttctctgccagagactgtagaaggaaagcgccatatttcttctcagatcgagaagaataggggactaacccgcaatcgcaacaaagcaaaaaagatccc

SEQ ID NO: 2949 - DNA, 272 bp, Glycine max
  Clone ID: 700557018H1
gttccgtttgctgacctgacctcggaaatccaaagagggaaactcacggtgtttcgttgcgttgtgctctgctctgctacctttgggcctgggctgggctgggctgggctgggctgggcatggctattgcagcagcggccgtggtggtaccattgggcctgctcttcttcgcctccggcctccttgttaatctcattcaggcaatatgctatgtcgtcgtaaggccggtgtcgaaaagtttgtacagaaggatcaaccgggtagtagcagag

SEQ ID NO: 2950 - DNA, 209 bp, Glycine max
  Clone ID: 700557019H1
gctgatggtaatgaaactgctggatcatacaaagttgctgtggttaacaggaagagaccctcaattcttgcactttctaggcaaaagttgacccaacttccaggaacttctattgagggagttgaaaagggtggctacaccatttcagacaactcatcaggtaacaagcctgatgttattttgattggaactggttctgagttggaaat

SEQ ID NO: 2951 - DNA, 271 bp, Glycine max
  Clone ID: 700557020H1
ctaaatttggaaggaaagtagtcaaagctgttacatacagggtcaagtctgtgccctcaacttccaagccttgtgtaaatgagaaattagaaaatggggataagctgatcaggttctggaagagaactgagcagcttatccccattttctcttcacttcttccattctccgccaccgccaccacaactaccaccacggatggcggcgacggcgacggcggaagcgaaaacctactggtgccacgagtgcgacatgagcgtgtccctgactc

SEQ ID NO: 2952 - DNA, 274 bp, Glycine max
  Clone ID: 700557021H1
tctgaattcattagttatcctatttacctttggactgagaagacaaccgagaaagagatcagcgatgatgaagatgatgaacccaagaaggaggaagaaggagacattgaggatgttgacgaggagaaggagaaggattccaagaaaaagaagaagatcaaggaggtgtctcatgagtggcaactcatcaacaagcagaaaccaatttggctgcgaaagccagaagagatcaccaaggatgaatacgcttctttctacaagagcctcaccaatg

SEQ ID NO: 2953 - DNA, 265 bp, Glycine max
  Clone ID: 700557022H1
ctccaaacagttggaatcgacgaaacgcaaaggcatattgacattggcatggctacctacgctgtgtacacccagctacagagtcacactgaaactgtacggaacagattcccataagttaaacgcaaagccctcagttcgttataggcgtcgttttggcaccaccaccagaatatgctgcacctctaataattacaacgacaacaacatccaacgacgaccccaatccgaagctattcaagtttactcgcaaatcgagagatta

SEQ ID NO: 2954 - DNA, 265 bp, Glycine max
  unsure (1)..(265): unsure at all n locations; Clone ID: 700557023H1
ctcgagaatataggagagagacagcaaaaggagcaaaaatgtatagtgcngctacagcncgctacagttgatgttcagctgactggaaaagagggagaagaaaaggtcaagttgcacacgcactcttactgttgtctagattatgcacagatatatgatgtggttaggtacagaatacatcgcatgaaaaagctgctgaaagatgaattggacaacaagaacacaattgaggaatatatctgtacaanatgtggaaaaagatatt

SEQ ID NO: 2955 - DNA, 272 bp, Glycine max
  unsure (1)..(272): unsure at all n locations; Clone ID: 700557024H1
catcctcacaaagatgcaaaccgagcactcttctctcgtttctcagctgctcccttattgtgatttattatgttaagtcccaaataatgncttctaagagagcctcatcagttacagttagttgtcttttgaagttgtgcaaaggatgttgctcacacaaaggccttagtacattgagtgctgtnagtactgctgctgaaaggacagatttacagttttctggtggttatcaaaatgatgattcttcaggttaccagcaaaatcgtgttggg

SEQ ID NO: 2956 - DNA, 271 bp, Glycine max
  Clone ID: 700557025H1
gatctctctctctcgcccacaatccaaccatggcgaatacggggaatttagacgcggcgatagagcaattgctgaacgtggagaagcagatgaggctcgccggtgacgtggcgggtaccagataagcagccaccgatattttgcagctctgcttcgatgcacgagcctggaaaacactcaatgaccagattgtcgttttgtcaaaacgacgtggccagctcaagcaggctgtaacagctatggtgcaacaggctatgcaatatattgacga

SEQ ID NO: 2957 - DNA, 271 bp, Glycine max
  unsure (1)..(271): unsure at all n locations; Clone ID: 700557026H1
ttcattcccactaaacaaaaaaataaagaaaaatttaccaaaatgccttcttcttccaccaccatagtctcnccatgcgtgatccaccccgaccagaaatcaaacatgaaacccttgagactctctgtttctgaccttccaatgttgtcgtgtcactacatccaaaagggcgtgttactaaccgctccgccctcgtctttcgaggatatgatactctcttttaaacactctctttctatcgcgctctctcactttccggctcttgcgggaa

SEQ ID NO: 2958 - DNA, 270 bp, Glycine max
  Clone ID: 700557027H1
gctaagggctacaaaatgaaaacccacaaggcatctgcaaagcggtttagggtgaccggacgaggcaaaatagtgcgtaggagagctggcaagcagcatttgctcgtcaagaagaataccaagcgcaaatcccgactctccaaaatgcacgcggtcagcaggagcgactatgacaacgtaattggagccttgccatttctgtttactttcagatatggcaaggctccaattacgttgtcatatctgaaagtaaacagaaatgctacatag

SEQ ID NO: 2959 - DNA, 268 bp, Glycine max
  Clone ID: 700557028H1
ctcattcttcatccatagacatggccaccgtcacttctgcagccgttgctattccctcattcactggcctcaaggcaagcgcaggcaaagtgagtgccgcagttaaagtctcagctccccaagccacaaggttgggcatcaaggcttcgctgaaagacgttggagtcgctgttgtggccactgccgcgagtgcagtgctggctagcaacgccatggccattgaagtgttgctgggtggtgatgacgggtctctggctttcgttcccaa

SEQ ID NO: 2960 - DNA, 269 bp, Glycine max
  Clone ID: 700557030H1
gccgtgggctggaagaatatggcttcatttgtttctacccactgtatccttcctagcggggttggatttgtgcatgaccaagatcgttcttgtggtagaactaacactttgcatcttcaaaatgctcctaaaagccctagctctctctcctttttgctctccgtgcgagaaagtagatcagatgccgttgttgttcagagcaagggtcgatcgtctttttctcaaacagctgctgtgaggcatcttacaggttctgttaccagagccca

SEQ ID NO: 2961 - DNA, 273 bp, Glycine max
  Clone ID: 700557031H1
ctcagcctcaacttcaacctttcttcacttcccttcacatggcagctcttgtgaaaccaatttccaatgtacactcccaaatttgtcagcagccccagaatgggctcatcacactcctccaaattcagcaccataataagaatgtctgccactgccaccccaccaccatccacctccacaaagccagcaagcagcaagaagggcaatatcaaggagaccctcttgactccaagattctacaccactgactttgatgagatggagacactcttc

SEQ ID NO: 2962 - DNA, 274 bp, Glycine max
  unsure (1)..(274): unsure at all n locations; Clone ID: 700557032H1
ggatcagctgcgctcattcagtttgcaagcaagaagcttttgtttgctgaggaccgaaagcaaaccgtgaaacaacttgatgagttcttgaacaccaaggttgcccctaaagaacttgttgatganataaaggatattggaaaggctcttctaccatcctctaccaataataaggctcttcctgctccagaagagaaaagttcagagcttgctacagctgatagcactgtacagaatgcagtagctactcccgagcccaaagcggatgcagtag

SEQ ID NO: 2963 - DNA, 275 bp, Glycine max
  unsure (1)..(275): unsure at all n locations; Clone ID: 700557033H1
ttcatttttaaacctagctccatctccctccactcaccataacatgnccatcagaagcaaatgctgccaacaccaacttctgtgtaaatgttagcaacaatggctacattagtgctaatgaccccttgaactggggtgcggcggcggaggctatggctgggagccacctcgacgaggtcaagcgcatgctagaggagtaccggaggcccgtcgtcaagctcggtggagagaccctgaccatctcgcaggtcgcggcgatcgggcccagaccaggg

SEQ ID NO: 2964 - DNA, 263 bp, Glycine max
  unsure (1)..(263): unsure at all n locations; Clone ID: 700557034H1
aaaagattgctattctgggatttgccttcaagaaagacactggtgacacangggagactcctgccattgatgtatgccaggggctactaggtgataaggccaacctgagcatatacgacccgcaagtaaccgaggaccaaatccagagggatctatccatgaacaagtttgattgggatcatcctatccacttgcagcccacaagtcctactactgtgaagaaggtcagtgttgtttgggatgcctatgaagcaacaaaggat

SEQ ID NO: 2965 - DNA, 222 bp, Glycine max
  Clone ID: 700557036H1
gctttcagcgcgtatacatctaagatttgtagttgcattagcaataccataatgcaactacaaacctcatattttaggctttcagcgcgtatacatctaagatttgtagttgcattatggtattgctaatgcagatttcacaactgaatccctcattcccactggctctgtaaaaggaattgataatttgacataatgaatgaactttgtgattattgagtt

SEQ ID NO: 2966 - DNA, 269 bp, Glycine max
  Clone ID: 700557037H1
gggaggctgtattagagggacacattgacctattaagtactgatcattcaccaactgtgcctgaactcaagcttatggaggagggtgacttcttaaaagcttgggggggcatatcatctttgcagtttaatcttccagtgacgtggtcatatgggaagaaatatggacttactctggaacaattgtctttattgtggagcaagaaacctgcaacactggcggggttagaatcaaaggggaccattgcagttggaaaccatgcagatatt

SEQ ID NO: 2967 - DNA, 271 bp, Glycine max
  Clone ID: 700557038H1
ctggtggatgttgcccacactgctgtaagaaatgatccaagaatcaactggctctgcaatccagtccataaacacagggaactgcgtggcctcacttctgctgggaaaagcaataggggtttacgtggcagaggacatctctaccacaaaaatcgtccatcacgcagggcaacctggaagagaaacaataccctctcccttcgtcgctaccgttgattttgttgcagttatcgtatgttgcttcattttctgagtatttggaggaaaatcg

SEQ ID NO: 2968 - DNA, 269 bp, Glycine max
  Clone ID: 700557039H1
attctcaagaccactactggaaccccatttctcatccctacaactggtactggtgcttgggagagtgctctcacaaacacactgtctcctggggatcgaattgtatcgttcctgattggccaattcagcttgctttggattgatcagcagcaacgcctgaagttcaatgttgatgttgttgagagtgaatggggccatggtgctaagcttgatgttctggaatcaaagattgcttcagatacttcacacactataaaggcaatttgcat

SEQ ID NO: 2969 - DNA, 205 bp, Glycine max
  Clone ID: 700557040H1
tagtgcctccttgccagaagttaaaatggcccaagaaactttcctattcacatctgaatcagtgaacgaggggcaccctgacaagctctgtgaccagatctccgatgctgtgctcgatgcatgcttggagcaggaccctgacagcaaggttgcctgtgaaacctgcaccaagaccaacatggtgatggttttcggagagatcaca

SEQ ID NO: 2970 - DNA, 267 bp, Glycine max
  unsure (1)..(267): unsure at all n locations; Clone ID: 700557042H1
tgcaaaantngcatcattcaccatgacagcttccatccttggcggcccagccgtcaccaaccggttggcagtagcaacgcagaggagatcactcgtagtgaatgctgccaaagctgttgaagcggaaaaggtcagttatgacaatgacatggatggtagcaatggaaggaggaacttgatgttcgccgcggcggcgcggctgctgtttgctctgttgctgggatggcagtggcagatgagccaaaaccaggaaccccagcagccaag

SEQ ID NO: 2971 - DNA, 268 bp, Glycine max
  Clone ID: 700557043H1
atcagttacaaggccagattcccaccagccttggccagatgaagaacctgaagtttctttctttggctggtaataggttaaatggtttaattcctaccagcctggggcagttgtactctttgaaagtcttggacctttcgtcaaactctcttactggtgagattcccaaggctattgagaacatgagaaatctgactgatgttttgctcaacaacaacaatctttctggtcacattcctaatggtttggcacatgtcgctacactctc

SEQ ID NO: 2972 - DNA, 251 bp, Glycine max
  unsure (1)..(251): unsure at all n locations; Clone ID: 700557045H1
catagatttagggnatcgattactatactagtaatanattgtaacaaanaatantaatatnaataatataantataanaagaacaancacanatttnangtgattngtcgcggtatttanaataaatnatgnnagtngacnaataaaanaggagaggngatgtttgaataanaatanttccccttcaagttcttatttttngngaggacaggacaatatgaatgtnttatnatgctctatcaacacattaa

SEQ ID NO: 2973 - DNA, 267 bp, Glycine max
  unsure (1)..(267): unsure at all n locations; Clone ID: 700557046H1
ctctctttctctctttctctctgtctagaatgcctctattctcctctgtcggtcacacacagcgatagatagataatagagaagagaagcattcataggcgccaattgtgagtgagagagaagtttctgttttttctacttttccatttttttnnnnnnnnnnnnnnnnnnnnnntctgattcttcaccataactgtcattgctttgcttctctcactcagcacaagttgacaagaagggcattgccatttcaatcccatacaaaaa

SEQ ID NO: 2974 - DNA, 272 bp, Glycine max
  Clone ID: 700557048H1
actactaccaatactcctcgcacaacacaaccacaatggccgcgaagaagaagaatggcggcggaaacggcaacaacaaggagaacgaagacagcaccatcaccgtcgtcttgaaggtcgaaatgcactgcgacggttgcgcttccaaaatcatcaaacacctccgctgtttccaaggtgtggaaacggtgaaggctgatagcgacgccgggaaggtgaccgtgaccggaaaagtggaccccacgaaagtgagggataacctggcggagaag

SEQ ID NO: 2975 - DNA, 273 bp, Glycine max
  unsure (1)..(273): unsure at all n locations; Clone ID: 700557049H1
gnaacaaattgctacatagcacacactccctcttctcttctacggttatggcgtccacgttgggcacttcttcaattgcggttcttccttcgcgctgcatctcttctttttcttccaagccttccattcacacactctctctaacttcagggcagagctatgggcggaaattttatgnaggaattggaattcatggcatcaagggaaggtctcagctctcagttgccaatgttgccactgaagttaactctgtagaacaggcccaaagtattg

SEQ ID NO: 2976 - DNA, 268 bp, Glycine max
  Clone ID: 700557050H1
tgattttgagatcaggtagcttcaagataagagaatcagaaactacttcaaagggtgcctctaccaccaacttttcaagcaaattgacggattgcaggcccgaacacatggtcctcgaaccaaacctttcgtgcattaaagatatggagatcatggaatcaaagagcagtgaacaacaattgcagcaccagcctgtccctgttctctctctgcctaaagaagtggttttctcttcgccaagaccggttagtgagcttgatgctgcggc

SEQ ID NO: 2977 - DNA, 268 bp, Glycine max
  unsure (1)..(268): unsure at all n locations; Clone ID: 700557051H1
attgctacgaagggctatatagcataaacatttgagtcttcattgcacaatgtcgacctcttccattaacgggtggtgcctctcttccatctccccagccaaaacctctctcaagaaggccacattaggcccttctgtcttcgcaaccgttagcannnnnnnnnnnnnnnnnnnnnnnnnnnnnnnnnnnnnnnnnnnnctcattcaagacaggcctgtctttgctgcccctgcccccatcatcaccccaactgtgagagaggatatg

SEQ ID NO: 2978 - DNA, 269 bp, Glycine max
  Clone ID: 700557052H1
cttctgaagcgtgagggcgatggaggaaagaaagccactcaaactctacttcattcatttcctagcagcgggtcacatgatccctctctgcgacatggccacactcttctccactcgcggccaccacgtcaccatcatcaccaccccctccaacgcccaaatcctccgcaaatccctcccctcccaccctctcctccgcctccacaccgttcagttcccctcccatgaggtgggtcttcccgacggcatcgaaaacatctccgccgtct

SEQ ID NO: 2979 - DNA, 266 bp, Glycine max
  Clone ID: 700557053H1
ggatgaactcacctctgtgatttgggacttgttcctttgtgaattggaaccaattctgctgaagtactcaatttcttgcattatgagtgatgcaactgtgcctctggttcctatttctactgggggaaattcagccttatcttttgtgtcatttgagtcaagggtagtggatttatgcatgctcttgttggttggtgttggggagaaagcaaaatcttttgatttaagggtggtttgtgggtttgttctagaggggaaactgcaga

SEQ ID NO: 2980 - DNA, 268 bp, Glycine max
  Clone ID: 700557054H1
acaaatcaaagccatggccacctccaacttctctattgttctctccgtctccctagccttctttttggtgctacttaccaaggcacactcgaccgataccgtttctttcaccttcaacaagttcaacccagtccaaccaaacattatgctccaaaaagatgctagtatttcatcctctggggtgttacaactcaccaaagttggcagcaacggcgtgcccacctcgggatctctcggtcgtgccctttacgctgccccaatccagatt

SEQ ID NO: 2981 - DNA, 268 bp, Glycine max
  Clone ID: 700557055H1
cacgaatatcttgttgtttggagcgatccgagaaaaactctgtaaacatgttggtttaccaggacctccttacaggtgatgagcttctctctgactccttccgttacaaggaaattgagaatggaatgctgtgggaagttgaggggaagtgggttgttaaaggagcagttgatgtagacattggtgcaaacccttctgctgagggtggaggagaagatgagggagttgatgatgcagctgttaaggttgttgacattgttgacacatt

SEQ ID NO: 2982 - DNA, 238 bp, Glycine max
  unsure (1)..(238): unsure at all n locations; Clone ID: 700557056H1
gtgatttacatctgaccactgagatgctcaancagtannagcttcaagttgatggtggtttcaancagaatctgaattcaaagactttgtctgctcccaatctcagtgcaatggactaccctgcacttacttcaccagatggccagactgcttcagtagaatatgtggttgataatgtgcaacaaagtggcaatccttaccgatcatatgacagtgatgtgctgcttttcaaatctgt

SEQ ID NO: 2983 - DNA, 266 bp, Glycine max
  Clone ID: 700557057H1
caggagtatataatctgagcgatgtcagatctcgaggctcccttgcgccctaagaggaagaaggtttgggtggactattttgttcagtttcgatggatccttgttatttttgtggtccttcccatctccttcaccatttatttccttacataccttggggatgtaagatccgagtggaagtcctataagacgcgtcagaaggaacatgatgagaatgtgaagaaggttatcaaacgtctcaaacagaggaatccatcaaaagatgg

SEQ ID NO: 2984 - DNA, 267 bp, Glycine max
  unsure (1)..(267): unsure at all n locations; Clone ID: 700557058H1
acttactggaagccttgttgtgagtaagagaaaaggcttcctgcaccgagcacaccaacttgatacctnctgattctttctttgcttagaattccacagaatatggagacggttcttttcaatcactccccacctttggaattcaagggtttgagcaaggaggaggaagactcattgctagggcaagtggaaatatggaggtacatgacatgcttcacggactccgtggccttgaaagctgtcatagagcttcgtatagcggacata

SEQ ID NO: 2985 - DNA, 266 bp, Glycine max
  Clone ID: 700557060H1
gggccaattcggccactcttctctgaaaaagcctccagcctccttcttcatccatcttccctctccaccaaaatcctccgcggttcgttccgttattcatcgaaccgttctctcaagtctcgtacttggcttagttcacaactcgaaacttcaccgaacgcattccattcaccaattcgtccaagtctcgtatcaatcagtcaatccgtctcgtggaggttggagagatcggaggggaaaggatccatggcgcatcgagtggacca

SEQ ID NO: 2986 - DNA, 267 bp, Glycine max
  unsure (1)..(267): unsure at all n locations; Clone ID: 700557061H1
ctctccttctacattactctctcttctcctaaaaatttctaatgcttccattgcttcatctgactcactcatcaatggctctgagactgaaccctatccccacccaaaccttctccctcccccaaatgcccagcctcagatctccccgcttccgcatggcttccaccctccgctccggttccaaagaggttganaatattaanannccattcnntcctcccananangtgcatgttcaagtnacccactctatgcntccncaganga

SEQ ID NO: 2987 - DNA, 266 bp, Glycine max
  Clone ID: 700557063H1
atctactctctttttttctaccttagattccttctccaacaatggctctcgccgtttccactacttcttcctcttcagcagctgctgcagcttctagctccttcttctctcgtctcggatcttcctccgacgcaaaagctcctcaaatcggttcgtttcggtttccggagaggtcgcttgtttcgtctgttgttgtcaatgtaactcaacgacgctccttggtgaggccactcaacgccgaaccgcaacggaacgattctattgtt

SEQ ID NO: 2988 - DNA, 270 bp, Glycine max
  Clone ID: 700557064H1
ctcaacactagtacttcatccaccataaccctcttaccctttacatcagcaaactcatttctctccaaaaccctcaaactcaacacctcttccccacactctcacctttcactacccctcaacaagtctttcacttgtagaagccaggctgaaccatcttctgactcagccaaagtccaagaactgagtgtgtatgagatcaatgagagagatcgtggaagccctgcttatcttagattgagccagaaaactgtcaattcccttggtgac

SEQ ID NO: 2989 - DNA, 268 bp, Glycine max
  Clone ID: 700557066H1
acaaaacgtacatccaagccaaccgagtttgccttttctacggtctcgtccttcttcttaaactacgagttgcattcaacaacctcttccacgaatttcttttctctcgacgagggtaaactcgtaatgttcgtttcgattttttccaaaagcgcctgcgtttcttcccgagcgaaatcttcttttcttccacgaaccttggattcatttcagtagcatctttcagggtttatattccattgaattttacaactttttattttggtaa

SEQ ID NO: 2990 - DNA, 257 bp, Glycine max
  unsure (1)..(257): unsure at all n locations; Clone ID: 700557068H1
cttgtttttgttgtgctatggcgcctgatgctgccgccgccaacggcaaaaanngaagacgctatcttcctcataacaaggcagtgaagaagaagggttcgtaccctctgcggccaggcgtgcaaggttttttcatcacttgcgatggcggcagagaacaccaagcctctcgtgaagctctcaatattctcgattccttttatgaagagctagttgatggggaacattcaagtgtaaaggagttacccagcaaacct

SEQ ID NO: 2991 - DNA, 268 bp, Glycine max
  Clone ID: 700557070H1
gctaactaaacaaaattctgatctcactgtacagtatcaaccaaaccaacaatccaacaccatgaaactctctgtgttccaccatcagcaccatcctatgattctcaattgcccccttaccttgacaaggacacacaaaagactttacaacaatggttcatataggtggttaccatgccactgctcacattcttccacaagtaaaactgctgcagaaccagttacagtttctttaagtattgaaggaaggagagcattactcagttgt

SEQ ID NO: 2992 - DNA, 264 bp, Glycine max
  Clone ID: 700557071H1
acagcacagatgatctgtctggtccagcagtgaatgggacatcactacttgaagaagatgaaactgatgtatttacatccgcggatcaaagggaaaggagggagaaacgttctgcagtgggcacacctgattacttagccccagagatacttttgggaactggacatgggtttactgccgattggtggtctgttggggtcattttatttgagttgctgttggtattccacccttcaatgcagagcaccctcagattatatttga

SEQ ID NO: 2993 - DNA, 267 bp, Glycine max
  Clone ID: 700557072H1
ttatcatcgtacctgatcaagaagttgacacgtcacgggtccctaaacggttgttagaataccctgttgttgatttatccagtgtggcgcacacacgctatgttgctatgtacgagtacgcgagcgacattgatgagccgacacacttgtacctaaatgcgaaaccgtatgaagcagcggctacggaaaccccgaaggtggggtccacagaggtgtggtatgtgatcaacttgacggaggataatcacccgcttcacattcatttgg

SEQ ID NO: 2994 - DNA, 262 bp, Glycine max
  unsure (1)..(262): unsure at all n locations; Clone ID: 700557074H1
cncacatggnggtggttntggnggcggccaaggaggtggagcaggtggagggtatggtgctggtgccgagcatggtggtggatatggcggtggtgaaggaggtggagcaggtcgagggtatgntgcanctngagaacatggtggtggttatngtggtggtcaaggaggacgaagtggaggaggntatggtgctgntggagatcatggtgctgctggctatgntggtgnagcttgangtgnagctcgtngaggctatggtgcc

SEQ ID NO: 2995 - DNA, 252 bp, Glycine max
  unsure (1)..(252): unsure at all n locations; Clone ID: 700557075H1
aatcgacgcattgccttacattgattatttccgcgtnagnnccggtangnctaccgtnagacggtggggcttccagcattagaactcccccgtcttacggtaggcctaccggttctaacggggnatnancgacggattgccttacattgatgacgantacgcagaccccagagtnacacttgaggttgacgtctcgtggaggatgaactgcgtngngctacnagaagngcacgtttactcaaagatttccct

SEQ ID NO: 2996 - DNA, 265 bp, Glycine max
  Clone ID: 700557076H1
cacattttttgttgcattatcacaaacacctcgtccctcacaatgcagctagcaatggcggccaacgctgtcgtttcaccgtcgccgttccgacctcagccctttctccggtcatccttctccggcgtctccgtcaagctcactccccaatccataacgctttcacgctccaagcccctcaccgtcttcgccgccaccaagaaggccgtcgccgtcctcaaggggacctccgccgtcgaaggcgtcgccactctcatccaagaag

SEQ ID NO: 2997 - DNA, 266 bp, Glycine max
  unsure (1)..(266): unsure at all n locations; Clone ID: 700557077H1
ctctccctgccgccgctgagacacgaagagtaactgcctcgcaacgccgcccttgccatcgcgacagagtgtcgtacncagcggagttccctcgcgacgccatcctcactgtgccgtttcaggtgtttgacgaaattccccataaacgaagctcatgggcaagaaaggaggggccaaaaaattagagtctgtgtctcacactccaatatcattgagggaagaagccaccggaaaaatacaaaccaaggcagcctcaaacaccaagt

SEQ ID NO: 2998 - DNA, 262 bp, Glycine max
  Clone ID: 700557078H1
ctaggcttcagaccgtgaaccgcaaactcactgcaatgaacaagttgttgatggaggagaatgatcggttgcagaagcaggtgtcacagcttgtttgtgagaatggttttatgaggcagcaattgcatactccatcggcaacaactactgatgctagttgtgattcggtggttaccactcctcagcataccctgagagatgctagtaaccctgctggactcctatcaattgcagaggaaactttgacagagttccttcaaag

SEQ ID NO: 2999 - DNA, 225 bp, Glycine max
  unsure (1)..(225): unsure at all n locations; Clone ID: 700557079H1
gtcttcaccaaacaaacaaactccactncatcgcgtgaagacgacgacgatggagatgctacgcagaagcagcagaagaatcttcgtctccgcgtgtgtgtggttgcttctgtcgctgtcaccgtcaccgcncagtgttgtnaanggnnacatggcgtattcaacgtgaagtgcaagtaccaggaccgctccctctccgccctcaaagcccacgactaccgccgc

SEQ ID NO: 3000 - DNA, 269 bp, Glycine max
  Clone ID: 700557080H1
ctctctcagaatttctatctatctcttgtttcaatttcaacaacggttactcctttttcgttttgagtttcaatcaagccatcatcatgtctaccgcatcgcaacccaaggccaagaaaacggcgtcgtccaagaagcccctctcccaccctcccttcgccgtgatgatagcagaggcgattgcgagtctgaaagagagaaccggttcgagccaatacgcgataaccaaatacatcgaagggaagcacaaggagttgcctgcaacctac

SEQ ID NO: 3001 - DNA, 242 bp, Glycine max
  unsure (1)..(242): unsure at all n locations; Clone ID: 700557081H1
cctccaaattttccttcattctcacgcgccgccgtggtttccgccggcggctactccctatccaccgcgcatccatcccgcttncctctcctcgcttttctcacaaaacaaaaaaaattaaaaatttctccgaagactgtgtattatcgttatngtncactgagttaggttttgctgttcttcctagggttttattgtgtccaataacaagaggagggggaagagaaacaanacaaacaaaa

SEQ ID NO: 3002 - DNA, 257 bp, Glycine max
  unsure (1)..(257): unsure at all n locations; Clone ID: 700557082H1
ctcgaggactagttctagatcgcgagctagaaccnntagctcgagccgctcgagcttcgaggttccaggcaactctgctggcaccgtcacagcctactacttatcttcaaanggagcaacatgggatgagattgactttgaattcttgggtaatttgagcggtgagccatacatccttcacaccaacgtgttcagccaaggcaagggcaatagggagcaacaattctacctctggtttgacccaactgcagattttc

SEQ ID NO: 3003 - DNA, 256 bp, Glycine max
  Clone ID: 700557083H1
gatttctgacgatgaggatgaggaagagaagaaggatgaggagggtaaggtggaggatgttgatgaggagaaggagaaggaagaaaaaaagaaaaagaagatcaaggaagtgtcacatgaatggtccttggtgaacaagcagaagcctatttggatgaggaagcctgaggagatcacaaaagaggagtattctgctttctacaagagtcttaccaatgactgggaagagcatttggctgtcaagcacttctctgtt

SEQ ID NO: 3004 - DNA, 264 bp, Glycine max
  Clone ID: 700557084H1
cccttcacaagattctcacaaacaactcttgagaaagaaagaatggctgccaacacattgatgagttctgccatctcagccttcccatctctcctttcctcctcaaaatccagatttgccgcagcagttcctctttccagctttgttgtcaccaatgcctcttcttctcgcttttccatgagtgctgactggatgcctggccagcctagacccccctaccttgatggttcagcacctggtgactttggattcgaccctcttcgt

SEQ ID NO: 3005 - DNA, 265 bp, Glycine max
  unsure (1)..(265): unsure at all n locations; Clone ID: 700557085H1
tccaaatccaatggcttcagagaagaaacttncgaacccaatgagggagataaaagtgcagaagctcgtcctcaatatctctgttggcgagagtggagatcgtctcaccagagccgccaaggtgttggaacaacttagtggccaaaccccagtgttttccaaagcaaggtacactgttcgttcctttgggattagaagaaatgagaagattgcatgctatgtcactgtcagaggtgacaaggcaatgcaacttttggagagtggt

SEQ ID NO: 3006 - DNA, 264 bp, Glycine max
  unsure (1)..(264): unsure at all n locations; Clone ID: 700557086H1
cataattctattacaatatatgttagtaactatattagttatgtttgacaangatnattttnaattttnttactaactgaaaaactaatttgattgttntgataagtaagtntttnccntttagtaattnctagtgtttattgaaatgctacttgaaatagtgcctttaaaatattagtttctaacttttattattttatatttnnnnnctttnatttttaatatatttatncatttnnnnattatcntttaaaataanntata

SEQ ID NO: 3007 - DNA, 153 bp, Glycine max
  Clone ID: 700557087H1
gaatggtcactttctgagttggatttgaatggtctatgtaaaatatgctatgtttatgtcttagattctttactgacttctgtccttttttttaagtatctattttatagttgctaatgtatatgtgtattaaggggccttaataataaatca

SEQ ID NO: 3008 - DNA, 265 bp, Glycine max
  Clone ID: 700557088H1
gcgacaccgtaattgaaaatccaacacaagagaaaagggcgttagggtttcgaagaagaagaagatggaagacattgttgatcacttggctttcgagcggaacaagacgcagttcgatgtcgacgagatgaagatcgccggttctcttcacgcttttgaagtttctgacaaaatggctcgcctcgtcgccagcgatccggcattcagaaaggatgacagagttgtgcttgataggaaggcgttatttatgaacactttgaggaaa

SEQ ID NO: 3009 - DNA, 260 bp, Glycine max
  Clone ID: 700557091H1
caatatcttctttgtcgcttttattatctgtttttccggcgatggattccggcgcgtggctcctgttcctggtggtcgtggctgtctcaacgtccggccacattcactctgaagcgatcctgagactcccgtccgagagcgaggagatctcgcgcgactactgcgacagtggatgctggcggtggagacgaacaacgccgggacgtggaaccgcgtgccggcgagttgcgtggacttcgtggcggaatacatcaccggag

SEQ ID NO: 3010 - DNA, 260 bp, Glycine max
  Clone ID: 700557092H1
tcttcttcttcttcactattttttcagttatcgtgaccttatcccaacccttttctgttgcgaaggtgcttctgggctgttgtcagatcaatccacaaccctcaattgttgggattcatataaagtctatgctttcactcaaatgctttaagtgcctgcaatctctttttgtcttatccgttgcaaagggaggctttccttgctgctggtgttttggctcttcctgtatcatggatggtattcatgggggtgattctcgg

SEQ ID NO: 3011 - DNA, 261 bp, Glycine max
  Clone ID: 700557093H1
atgcaacagaggagtatgcagggatttcctggtattgactgtgagcctaatctatcgaatcagcacaatgtactgggatgacaagtatggaacccaaagtgtgtccaatgaggtagttagtgaaatgagagaattctcagcaaggacaatcagaatttgacctcaaattctttcttattagatgatgatctgagtctggtgtagcggaactggagaaatggatagtcaatgcaacagaggagtatgcagggacatcctggc

SEQ ID NO: 3012 - DNA, 209 bp, Glycine max
  unsure (1)..(209): unsure at all n locations; Clone ID: 700557094H1
caatgatcctactccagattattgtacattacttagtttcggttttctaccttganancnagcctagtaattctgtaaaattaggatgtgccatgtaatatatcctaaatgaaaatgactaaatattttacatggcacatcctaattttacagaattactaggctggctctcaaggtagaatatttagtcattttcatttaggatatat

SEQ ID NO: 3013 - DNA, 264 bp, Glycine max
  Clone ID: 700557095H1
gtgtatttccctacctctcccttcaagatgcagatcttcgtcaagaccctcaccggcaagaccatcacccttgaggtggaaagctctgacaccatcgacaacgtcaaggccaagatccaggacaaggaaggaatccccccggaccagcaacgtctcattttcgccggaaagcaacttgaggacggccgtacccttgctgactacaacattcagaaggagagtactcttcacctcgtcctccgtctccgtggtggcatgcagatc

SEQ ID NO: 3014 - DNA, 264 bp, Glycine max
  Clone ID: 700557096H1
gtcatttcttcagatgaaccattgctctgcgtggatgaccttgctgaccagattgcagaagtgcttgatttctttgggctaagggaggttctgtgcttgggtgtaacagctggtgcttatgtcctcactctattagctatgaaatacaaagaacgagtgcttggattgattcttgtttcacctatttgcaaatctccttcatggactgaatggctttacaacaaggtcttaatgaatttattatacttctatggtatgtgcggt

SEQ ID NO: 3015 - DNA, 222 bp, Glycine max
  unsure (1)..(222): unsure at all n locations; Clone ID: 700557101H1
gctttcagcgcgtatacatctaagatttgtagttgcattancaataccataatgcaactacaaacctcatattttaggctttcagcgcgtatacatctaagatttgtagttgcattatggtattgctaatgcagatttcacaactgaatccctcattcccactggctctgtaaaaggaattgataatttgacataatgaatgaacttttgattattgagtta

SEQ ID NO: 3016 - DNA, 294 bp, Glycine max
  unsure (1)..(294): unsure at all n locations; Clone ID: 700557102H1
ttcaaactcactacatactccatggaattgagaacccggcgtaattggttttctccagcggctctttttcctatattctgatggccctgctacgtctgcccactacagaacaggcctgactcccgtgagcaggtccgctggctcttagtatggcttttgacttttctgatccggcatgataacaactcgaacnaacttctattctttcaagagcaagagaagggcaccgagatcccgcgtaaggtcgtttgcccgttgccaataggatcgacttgggtagtaagattcattgtg

SEQ ID NO: 3017 - DNA, 163 bp, Glycine max
  Clone ID: 700557103H1
cttaaatagaacgttgttagggttattttatttgattgcatgtttttcagttttgtttttattttttctgatagtttgtttgttaaactatttgggcacccttttgagaaccattttcttcccaacatatggagttttcaatagacggtctctattatttgtt

SEQ ID NO: 3018 - DNA, 291 bp, Glycine max
  unsure (1)..(291): unsure at all n locations; Clone ID: 700557105H1
caagtgaagcccttatttttctcttcaaataactccacaaaacttccaggtngcttttctttnaagagaaaagatagtgacacaacagtagagagacgagtttattgctctgccgctgctcaatcaccaccaccagcatggccaggaacagctattcccgagccttctgatttcaagacatgggatgggcaaaacctatttctgtcttaggatctacgggttcaattggncctcagacactgagtatagtggctgagttcccagaaagatttaaagttgtgagcctgctgc

SEQ ID NO: 3019 - DNA, 304 bp, Glycine max
  unsure (1)..(304): unsure at all n locations; Clone ID: 700557107H1
gaaggtgaaagatattgaacttcaagtgacaganagattcagggacagagtggtggaggaaggttataaccctagttatggagctagacctctaagaagagccataatgcgacttttggaggacagcatggctgagaagatgcttgccagagagatcaaggagggcgactctgttatagtggatgttgattcnnctggtaatgtattgtgctcaatggtagcagcggagcccccgaatcctgccagagacgctcctgtataatgcggttaatttgctaatactatgtacttatttgtttaaacc

SEQ ID NO: 3020 - DNA, 97 bp, Glycine max
  unsure (1)..(97): unsure at all n locations; Clone ID: 700557108H1
gnaggtgananatnttgaacttcaagtgacagannagattcagggacagagtggtggaggaaggttataaccctagttntggagctagacctctacg

SEQ ID NO: 3021 - DNA, 221 bp, Glycine max
  unsure (1)..(221): unsure at all n locations; Clone ID: 700557109H1
gaagttattagggaagttttaggcccattactgtttgtggtaacaattaatgtctatgtgatatgtatttgagtttttaatttacaagaanagaactaatgatactctattacgcgtcacataaagattaattgaaactgtgatagtctaaactttgcgatgtttactcattaacttaactatgtccgtcatgtagtaatcattggtacatttgttgagaa

SEQ ID NO: 3022 - DNA, 143 bp, Glycine max
  Clone ID: 700557110H1
gatttctgtttctctgtcttcattttagtttttacggctagaagaatgtccagctcatcggaatatttggtattttccggccaccacccggcgaactctccggcggaaaagtccactttctctcagacttgtagtctattgag

SEQ ID NO: 3023 - DNA, 87 bp, Glycine max
  unsure (1)..(87): unsure at all n locations; Clone ID: 700557112H1
gcgagtggatctggacgggaaccccatgaaggnacttacgatctgcatgatcggcgctggcngcttcatnggctcgcatctctgcgg

SEQ ID NO: 3024 - DNA, 301 bp, Glycine max
  unsure (1)..(301): unsure at all n locations; Clone ID: 700557116H1
cacaaggcagaaagcaagctcatcctagngttttaaaaatggcagcagcctcctccatggctnctctcttccccatccttggctggcaaggccgtgaagctgggcccatcagcccccgaagtcgggagggtcagcatgaggaagaccgtcaccaagcaggctcctccggaagcccatggtacggcccagaccgcgtcaagtcttgggcccattctctggcgagcccccgtcctacctcatggcgagttcccaggtgatacggctgggacatngctgggtttcggccgacccagaaacttcg

SEQ ID NO: 3025 - DNA, 296 bp, Glycine max
  unsure (1)..(296): unsure at all n locations; Clone ID: 700557117H1
tttatttgaattttgttctcttttttcttcccgcgaagaataaaatattggagataaaattgtttttgaagtgttggaatctatatttgggttttttcattctaaaatcaaattaatgataaaattgcgtatagttttgtttatttagagcaacaactagtncgaaattgctcaaactcaaatcaatttggatctaaatcaattctgcggtattatgaatatttacctatgatcacttaattctgaatcgcgtgatgttgtgaaatttatctgcaggataagcggtgagatcgtga

SEQ ID NO: 3026 - DNA, 294 bp, Glycine max
  unsure (1)..(294): unsure at all n locations; Clone ID: 700557118H1
gttcttttcaaaatttgtgatattttatgacgcatataggggtaactcgcaggttataccaatcaaattactttttttttcttctaatgtaaatcaaaatgttagtgaaaataaaaagaacattactagaaagaaaaaaaatgaatctcttgaattggagttagagactcgaaatcgggcaaaagcagaatacctgatcaacgaaatcttgaatcatctatctcaaaccaagaaaaagatattgaaaacgttatgtaggtcagacagtgaaaagntagtaagggttaaagaaaa

SEQ ID NO: 3027 - DNA, 271 bp, Glycine max
  unsure (1)..(271): unsure at all n locations; Clone ID: 700557119H1
gnatacgtnaccgtgtggaggtgtnctgcttgacttgagtaannaaattgttgattgttaattggaagtgaagaagaaggcaatgccaggtcctggtcctcaccttatgtatgccatgggttctggtttgtgtctcacaagcatcagcaatgggaggtttagtccccaccacaatcttctacaccatcaacgcctctttggccctgatgttggttctttcacggagtggcttggttcactcttggtggctctgctcatgctttggatctgc

SEQ ID NO: 3028 - DNA, 295 bp, Glycine max
  Clone ID: 700557120H1
cacaaacacatacattgtagtatcacttttgtctcggaatttgttcttttgagttatggcaagcttaaaggttgcatgtgtggttttgatgtgcatggctgtgatgagtgcaccaatgatggtgcaagccgtgtcatgcaatgatgtttctgtgaacctagcaccgtgcctatcttacctgatgcagggtggaatgttccagaatcgtgctgtagcggagtgaggaacattctgggttctgccagcaccacctttgacaaacaaaccgtgtgcaaatgtcttcagcaagctgcta

SEQ ID NO: 3029 - DNA, 300 bp, Glycine max
  unsure (1)..(300): unsure at all n locations; Clone ID: 700557122H1
gcaaagttaataaaattctttgagttgaacacaggggccaagattccttctgttgggttaggcacttggcaagctgagcctggtgttgtagccaaagctgtcaccacagccattctggttggatacaggcatattgattgtgctcaagcgtataacaatcaagcagagattggttctgctcttaagaagcttttgatgaggtgtggtgaagcgtgaggacttatggatcatntccaaactctggtgttcagatcatgcttcagaagatgtgcccaaattttggataaaacatgcaggant

SEQ ID NO: 3030 - DNA, 302 bp, Glycine max
  unsure (1)..(302): unsure at all n locations; Clone ID: 700557123H1
ctctcntgttgtacanttntnccnttnggtttgcnnaaaggaacatngaagctgtgtgtgcttnntctgttggcacacttcncatcccaacagcacatgnaacatcaaantccttaggaantccntattcttgagcaaccaagtggctcaccagtttcattggnttntctcangngcagttcaaaatccaagnttataactgctngtnancccntcnattgacagaatccagtnaccaacctgaggctgagccagaatttgaaagtcngcagananatttgantggtactctcagtggtacc

SEQ ID NO: 3031 - DNA, 190 bp, Glycine max
  Clone ID: 700557124H1
acaggattggctacttatggagagaaagagtggtacttcttttcaccacgggaccggaaatacccaaacggttcgaggccgaaccgggcggctggcaccggttactggaaggcaaccggggcggataagcccattggtcagcccaaaccggttgggattaaaaaagctttggtgttttacgcagggaaag

SEQ ID NO: 3032 - DNA, 299 bp, Glycine max
  unsure (1)..(299): unsure at all n locations; Clone ID: 700557125H1
ctccgattccgcatttctctgcttccactgcgacgccgccgtccacgccgccaacttccnccgtagctcgccacctccgccgcctcctctgctccaaatgcaaccgtttcgccgcaattcacatctccggtgctatatcccgccacctctcctccacctgcacctcttgctccctggagattccttccgnngactccgttctctcccttngctnttntacctgcgtatacagttccgagtcttgctctacgaatcagattaaggcggagaagaagaggcnaaagaggaggatnnntttc

SEQ ID NO: 3033 - DNA, 137 bp, Glycine max
  unsure (1)..(137): unsure at all n locations; Clone ID: 700557127H1
ctggcgccatggcccgaaccgcccatacgtcgtcgtttgggtcgantcaagcaacaagctctcgacgcgcgtggaacgaaagcggcgacactgacgcgaattgggaccaaacgctcacaatnccgttgccaccaaag

SEQ ID NO: 3034 - DNA, 176 bp, Glycine max
  unsure (1)..(176): unsure at all n locations; Clone ID: 700557128H1
tgttgatcgagataactagaaacagtgttatgaaaatgaaggtccttgtnttcttcgttgctacaattttggtagcntggcaatgccatgcgtacgatatgttccctctccgaatgaacactggctatggtgcccgtactccggaggtgaaatgcgcaagttggaggcttgctgtg

SEQ ID NO: 3035 - DNA, 302 bp, Glycine max
  Clone ID: 700557132H1
gttttgttcggtggtcaattcccatccacacgcctcaccggaaacatgtcagcggtggttgctggttcctcctcttcattctctgccaccttcactaccagaaggagcccctccttaaaaaactctcaactctctcattccaagacactaacttctcctcaatgccagaagacatctttacaaggcctctcacttcataagccaaaaggggtgtttcagaatccttcctagttgagaacaagaatggttcctccattgctggaaggagacttgagatcaaagcaagaatgctggggcctcaa

SEQ ID NO: 3036 - DNA, 304 bp, Glycine max
  unsure (1)..(304): unsure at all n locations; Clone ID: 700557133H1
agagggtgcaaagtgcatcttctttttgttgttctctcaaactttaacaatctcataaataaataatcagannnnnnnnnnnnnnnnnttgaattcgaaaaatcgtagcgtactttggttgcgattgaaacggtacgatgggaagaggaaaattcaagagcaagcccaccggtcgccgccagttctccaccccggaagattgcttgctggaacctctaaccgtcctcgaacttttagacagaaagaagctgagcatgaagaggagcctgaggaagtatctggggatgatctggagaagaatcag

SEQ ID NO: 3037 - DNA, 307 bp, Glycine max
  Clone ID: 700557134H1
atcaaaagcagtcaaacaccaaaggagacggcttctatcaataatgcatctattccgtctatcaactcaacctgctctggtgatttagaacttctttttgaatattttgaatttgagcaacctcaacaaagacaacctctttatgagaagatacaagaactggttagaggccatataccaattgaatcttcaacttatggggaccacaaaactggattcaattaacctacgagatcttcaccctagatcttggttctcagttgcatggtatccatttaccgcataccagatggcaatttcgtgcatc

SEQ ID NO: 3038 - DNA, 307 bp, Glycine max
  Clone ID: 700557135H1
aatagattatcctaagtctttgggaatagtgctgcaatggcttcaagtcaggaggaggtgacccttttgggagctactggaagcccatttgtgtgcagggttcatattgccctcaagttgaagggagttcaatacaaatatgtcgaagaaaatttgaggaacaagagtgaactgcttctcaaatccaacccagttcacaagaagttccagtgtttattcacaatgagaagcccatagcagagtctcttgtgattgttgaatacattgatgagacatggaagaacaaccccatcttgccttctgatcc

SEQ ID NO: 3039 - DNA, 300 bp, Glycine max
  unsure (1)..(300): unsure at all n locations; Clone ID: 700557137H1
ctagttctagatcgcgagcagccacgtgnnagtgttttgtttgtntccttcggaagcggtgggacactctcgagtgcacagatcaacgagctggttctcgggttggaaaaaagtgagcaacggtttctgtgggtggtgaagagcccaaacgaagaaatagccaangcgacgtacttcagcgccgagagccaagcgganccttgcagttcttaccggaagggttcgtggagagaacaaaaggaagagggtttttggttcagtcttgggctccgcagcctcaggtattgggccatccatcca

SEQ ID NO: 3040 - DNA, 301 bp, Glycine max
  unsure (1)..(301): unsure at all n locations; Clone ID: 700557139H1
tnacttttganctaacattagttaggganattatacattcgggcacgatgacaccctgtgtgttagatctcatttttaaacttcatataattctttttcgggcgatctaagatgttataaccatggaattattggtcaaattttagtttctatataggtatattggaaaaaactatgatcgtcaatttctgctcccgcagtatctncctatttttacatgtgtaatgattagtgtacactgcattctagagacataataagtgaaaggaaatgaaaggnaaaagattaaaaacatgaaaat

SEQ ID NO: 3041 - DNA, 293 bp, Glycine max
  unsure (1)..(293): unsure at all n locations; Clone ID: 700557140H1
aganaaatcaccacattttgtactaaacctgcttattagtttcttaactagccttgtttttgtgttattttgcatggcttccaagcaagaaccaaagctctctttgacccttctagtggacaaagaaagaaactgtgtggttgtggctgaagcaagtggagacttgatagacatattgttcagttttctcnccttccactcggaactatcataaggcttgtgtcgaaaaagcaagggcacgacgaagcagacgaaattggttgcataaacaatttgtaccaaagcttggaaaa

SEQ ID NO: 3042 - DNA, 183 bp, Glycine max
  unsure (1)..(183): unsure at all n locations; Clone ID: 700557142H1
gtttgttgtgagctataagctagtttatcgtgaggagnatatgaagttgttacgttttctttgttgctgcagtagttttggtagcatggccatgccatgggcgcaggctaccaaaggttccctctccgaatgaaaactggctatggtgagcgttcttcggaggtaaaatgcgcaagttttagg

SEQ ID NO: 3043 - DNA, 290 bp, Glycine max
  unsure (1)..(290): unsure at all n locations; Clone ID: 700557144H1
tcgaatgtcctnccagtgatgaaggaattnggtgtanaaatggttggaatccgagangaagatttgganagcacnaatttcnccnatgganagaactncggatccgtcaagagtntagcccatatgagatgnaggntgaataatcaggncntgcatgttttntgtaacgtgtcgtctgtatgatcncnctacatncttcganatctcncagtngtangactgtcatggcacnataggaattctcttgganagtccatcngtagcagaattttccnccctggctagactga

SEQ ID NO: 3044 - DNA, 297 bp, Glycine max
  unsure (1)..(297): unsure at all n locations; Clone ID: 700557146H1
gcgcaaaccaaaccaacacaaacaaaaacatctctcagcaaatgantattctcggacaatcatccaccaatcaaacaacgggcagctactcttgttcgtcgccggagactgcaaactcctctaaccttccgaccactccgaaagctgttcactccgacgaggaagtgaacacattagcatcggctcatcctaagaacgtgcggggcgtcgatttttaaggagacaaggcatcccgtgtacagaggagtgcggcggaggaacaacaacaagtgggtctgcgaggttcgtgttcccaac

SEQ ID NO: 3045 - DNA, 137 bp, Glycine max
  unsure (1)..(137): unsure at all n locations; Clone ID: 700557147H1
caagtgcttcttctaattgtgcccaantttntntcctcttctcaccacataacaacataacncaacttcttcccagttcccacattttaccaacttaatatggcttcctttgttcttgggactactttccttccact

SEQ ID NO: 3046 - DNA, 151 bp, Glycine max
  unsure (1)..(151): unsure at all n locations; Clone ID: 700557152H1
cttttcagctttcattggtgtggcctagntgttttntcaatgagacngccttcatctctncnnaagcgcacttttgcgcttggggttcccttgttgcttgtnatcacctncnnnnatgctacttctactgctgcagcnacaactcaagttt

SEQ ID NO: 3047 - DNA, 91 bp, Glycine max
  unsure (1)..(91): unsure at all n locations; Clone ID: 700557156H1
gttgaattngagcgggtcgtatttaaataagaatttcttttcctttnntncttagtttctatcgaaaaaaaaaaagatnccgatagaaact

SEQ ID NO: 3048 - DNA, 303 bp, Glycine max
  unsure (1)..(303): unsure at all n locations; Clone ID: 700557157H1
cttcaccctcttgggcttgtgnatcagcaccacattcacctgagcttntttgtggaggattccaaaagcatggcttcccttgcagcatccactgctgctgcttccccttggcatgtcagaaatgcttggaaaccccatcaacctcagtggtgccacaaggccagctccatctgcctctagccctgcctccttcaagactgtggctctttctccaaaaagaaggctgcacctccaaaaaaagctgcagtgctgtctgccatgatgagctgccagtggtatggtctgacagaaggatcttcttgc

SEQ ID NO: 3049 - DNA, 294 bp, Glycine max
  unsure (1)..(294): unsure at all n locations; Clone ID: 700557159H1
aangaaatcttgaatcatctatctcaaaccaagaaaaagatattgaaaacgattatgtaggatcagacagtgaaaagaatagtaagggtataaagaaaaagaaagacaagaacaagatggaggcagaacttaatttcttactaagaaattttttgattttacatttaaattggaataatttctaggtcaaagtatataacaatgtcaaagtatattgtctcctgattagattaaaaatttaagagaattacaatagccctatcaaagaggagaactaggtctagatattatgtg

SEQ ID NO: 3050 - DNA, 122 bp, Glycine max
  Clone ID: 700557160H1
catttctccatttccattttctctctcacttttcaagaatcgtaagctatgggaaagtcttacccaactgtgagtgctgattaccagaaggccgttgagaaggcgaagaagaagctcagagg

SEQ ID NO: 3051 - DNA, 300 bp, Glycine max
  unsure (1)..(300): unsure at all n locations; Clone ID: 700557161H1
cccaactcaatttttctctcaaccggccnaatttagcataagcccagcatggccatcgcaacatcagcagccacctcgtccttcatggggacgcgcctcctggaggcccactccggggcggggcgggtgcaggcccggttcgggtttggcaagaagaaagccgccgccccgaagaaagtttccagggggtcgggcttagctccgataggcccctgtggtatccggggcgccaaggcgcccgagtacctggatgggagccttgtcggagattacggattcgacccatttgggctagggaag

SEQ ID NO: 3052 - DNA, 145 bp, Glycine max
  unsure (1)..(145): unsure at all n locations; Clone ID: 700557163H1
agctagtatctaaggtatcaacaatatggtatttntnatttttattantgtcaatctgaacaaattattatacacagtattgtttagccctgtacttttgtgctctgatcaaataagtgaagaactggtgtagtataatcgtgca

SEQ ID NO: 3053 - DNA, 87 bp, Glycine max
  unsure (1)..(87): unsure at all n locations; Clone ID: 700557165H1
anagagggtgcaaagtgcatnttctttttgttgttctctnaaactttnacaatctcntagataaataancannnggggtgtgaggat

SEQ ID NO: 3054 - DNA, 298 bp, Glycine max
  Clone ID: 700557167H1
caatgcttcacccggcggcactgatagcttcgtgtccttatccttatccttatcctgggcggcatgagttaccctcagcctcagcgtcagcgacagctagagtcgctgttccaatgccaaatctgagaggcaaagcggttgttggtgttggttccagaatgataaggtgcatggctaaccccagaagagttcatatggtgccaagcaaattaggagagagcttctcatatgctctcaccgataaagtcttgcagtatgctgttctcccgaagcctccttaggagccgaccgttacctc

SEQ ID NO: 3055 - DNA, 294 bp, Glycine max
  unsure (1)..(294): unsure at all n locations; Clone ID: 700557170H1
cncanaatggngcgagtngatctgggacnggaaccccatgaaggcacttangatctgcatgatcggngctggnggcttcataggctcgcatntctgcgagaagctcatgtccgaaanccctcacaccgtcctcgccctcgacgtctacaacgacaagatcaaacacctcctcgaaccctccgattccncctgggcggccgcntcacnttccacagaatataacaattnagcatgatctcgcttcgaangctgcatcagagggagatcaaatnattnatttggctgnaattgcac

SEQ ID NO: 3056 - DNA, 284 bp, Glycine max
  Clone ID: 700557171H1
gttgtgttcgacgaggacgagattcctagcggcgtggatgcagggaaaatctccatgagcgaagaagaccttctcaatgcggctggtgagactacagcgttactttggatgccaagggaacctacagtttctactgttcgcctcaccaaggagctggtatggtgggaaaagtcaccgttaattattatatattgtctcctacgtctaagttctcatatgcttgttttcctagaagagcctaattcatcttctgttagggcctatgggatgaatcaacaatataa

SEQ ID NO: 3057 - DNA, 293 bp, Glycine max
  unsure (1)..(293): unsure at all n locations; Clone ID: 700557172H1
ctttttctctctccttctttctttgtttctgtgtgttcgagattgangaagatgatgcaggctggacccggcggcatggcccaacaagcgaaccaacaatacgcacagcaacagcaacaaccctacatgatgatgccgccgcagcctcagccccctcattgtgggccacatcggcccagcctccgtcccagtcgtggctcctccgcaacccaccagcgccgatgaggtccgtaccctctggatcggtgatttgcagtatggatggacgaaaatatctctacacctgtttggca

SEQ ID NO: 3058 - DNA, 150 bp, Glycine max
  unsure (1)..(150): unsure at all n locations; Clone ID: 700557174H1
tgcctccgctaactgcattgtcgccggcanaaaggccctcgaaaacgccgaccttgcccccgacaaccactccaagattgataaggagcgtgctggtgttcttgtaggctctggaatgggaggctaacggtgttttctgacggtgttcag

SEQ ID NO: 3059 - DNA, 304 bp, Glycine max
  unsure (1)..(304): unsure at all n locations; Clone ID: 700557175H1
taacaaccttgtcgacacagcaaagcaaagtaacatattaagagaagaagatgtgtttggtgtttgtgtgcggggaagatgagagggtggtgtcaaggcagccagcaccgggggcctgtccttactgcagagggatgatccaagctatggacgtagagagtcagtggaatttctgtttcctacctttgtattctaagaccnagccaggtattactgcaccatgtgcaccagaaaactcgtccttcagtaatactgcatgatgctgatgctcacctacttttttcccgggtttaattactactaa

SEQ ID NO: 3060 - DNA, 311 bp, Glycine max
  unsure (1)..(311): unsure at all n locations; Clone ID: 700557176H1
gttcctaccatagtgctaggaaagtgagtgagaganagagatcacatagcagaatggcttctactcaatgtttcttgcaccaccatgctcttaccacccctgccagatccccatcacaacgcatcatggttagcaccaagcctaaccagcttgtttgcaaggcacagaagcaagaggatattgatgtcagcccaatctctcgccggtagctctaaccgtgctcattggtgctgctgctgttggctccaaagtccaacctgctgatgcagcttatggggaagctgccaatgtgtttggaaagccaaagacag

SEQ ID NO: 3061 - DNA, 204 bp, Glycine max
  unsure (1)..(204): unsure at all n locations; Clone ID: 700557177H1
ctgaattctgcaaacagtactattaaccgcttggggcaggagcttnaaaaatgaganangtttgattgaggacctgaaacttcaaattgaccgacttaaagctgagctttcaaagactgatacagataagaaggatcttgaaaacaatttgaaaganaagatagattccatggtgttttacaaganagaatcatctgctgagtg

SEQ ID NO: 3062 - DNA, 311 bp, Glycine max
  unsure (1)..(311): unsure at all n locations; Clone ID: 700557178H1
gtgatttcagtgagtgatcggtgttcacttgatctcatcataatcgtcagcgtcaattgaagaagntgccgatcagaaacatcgccgtcggaaggcctgaagaggcgactcaccccgacacgttgaaggcggctttggctgagttcatctcaaccttcatcttcgtgttcgccggctcaggctccggcatcgcctacaacaagctcccgacaacggcgctgccacccctgccggcctcatctccgcctccatcgcccatgcattcgccctcttcgtcgccgtctccgtcggcgccaacatctccggcggcc

SEQ ID NO: 3063 - DNA, 307 bp, Glycine max
  unsure (1)..(307): unsure at all n locations; Clone ID: 700557179H1
tacaaaacactcactatcctaaggncaaattgcctaaaactattacacacaaatggaagtangatgacctattgaaggctcccaacttacttccaatgaaaggtcttttgttacaaaatttgaaagcaaagcaaattgccaattacaaaattacatanaaaaattcctcaattttggtggttattctctctttggtgtttcactctttggagtgctcttagtccaatagctcttaaggtggttggcccctagcttcttgactcaaattcttcaagggatgacaccaatcctccttccaatccctata

SEQ ID NO: 3064 - DNA, 293 bp, Glycine max
  Clone ID: 700557181H1
ttgaagttgaagtcttgcccttctctcttcaactccaaacacaagacatcatcatccatggctgcctccgtctccactgtcggagctgtcaacagagctcttttgaacctgaatgggtctggacctggggtttcagctcccagttcatccttctttgggagcagcttgaagaaggttattggctcaaggtcccccaacacaaagatttcctctggaagcttcaagattgttgctgtagaagagaagaaagagattgaagagacccagcagaccgacaaggacagatggaaggg

SEQ ID NO: 3065 - DNA, 292 bp, Glycine max
  Clone ID: 700557186H1
gtcaccatgcattatttttatagatgaaattgatgcaattggtacaaagcgttttgatagtgaagtaagtggagacagagaggtacaacgaactatgttagaattgcttaatcagcttgatggttttagcagtgatgaccggatcaaggtgatagcagcaactaaccgtgcagatattcttgatcctgccctatgcgttctggtcgtttggatcgtaaaattgagtttccacacccaagtgaagaagcaagagctcgaattctacagattcattcaaggaagatgatgttca

SEQ ID NO: 3066 - DNA, 295 bp, Glycine max
  Clone ID: 700557187H1
ctcatcccactcaacacacagcgcagagtaagatcattttcaaccattataggcgagttgcgtagaacaccaagaacacccgaggctgtattttctgagcgtctgctgtcaaggctataccgtttaaagcaaacccataacagatatcagcatatggacacattcttgggggaaattctaggcgcagttgtctggctgagagccattcaggtcttaatccaaaatttgaggcgaaggcagttaaagttttggctgatggcaatgaatcaagtgatggaaaaactgtggtagatga

SEQ ID NO: 3067 - DNA, 100 bp, Glycine max
  unsure (1)..(100): unsure at all n locations; Clone ID: 700557191H1
ggttnctttcncttcagatttggntaattagggttccgttnncgcgactaagnccgnnggcagtngaagcancaaaacccaatcacagancctcactntc

SEQ ID NO: 3068 - DNA, 304 bp, Glycine max
  unsure (1)..(304): unsure at all n locations; Clone ID: 700557192H1
gttgagggaggtcatcgagccattgtcttcaatcgtgttgtcggtgtcaaggataaggtttatcctgaagggacacatattatgattcctttgttcgagaggcctgtgatctacgacgtacgtgcacgacctcatttagtagagagtacatcagggagccgtgatctccaaatggtgaaaattggactcagagtcctacgcgcctgttcctgaccagttaccgacagtttatcgaaccctgggtgagaattataatgaaagggtcctgccttcnttatacacgaaatctcaaagctgtagttgc

SEQ ID NO: 3069 - DNA, 173 bp, Glycine max
  Clone ID: 700557193H1
gcttcttcgctgctgtgattccgtcggaagaaaatgggaaccggttcgaccttggccgggaaagaagttccaatcgtcggaagcgacgccgttcgctggatcgatctctccgttccatcttcgtccaacattgccgccgtcgacggcgtcgccgcccttcccaccaccgacga

SEQ ID NO: 3070 - DNA, 138 bp, Glycine max
  unsure (1)..(138): unsure at all n locations; Clone ID: 700557194H1
cnaagccaaaccanattttntntctttcacttatttnttgactccccaaaagcttttcaaatatctctgttcctctctcacgtaccttctccctatctttcactccacttcttaacaccacaaaacagaacaacggcc

SEQ ID NO: 3071 - DNA, 303 bp, Glycine max
  Clone ID: 700557195H1
aaagggaatgcaagtgcttgaatatgttggtaaggagacaatggacttattaatcagtgaaactggaattgaagttgagaaagataaaaaagaaggtgaagaagaaaatgatgaggatcaattatcagaggaagtgacttttgatcgatgctttacatttatggaggtccagaacaattggaggaactggaggcttgtctagcattatgcatgttatttaaccgaagaaaagcaaagctatcagctgagcaaaagtctgtatatgatgggaagctaaagaggtccaacaagtattaattgagt

SEQ ID NO: 3072 - DNA, 292 bp, Glycine max
  Clone ID: 700557201H1
tggaaacaggcatagcatgctacactcgcgggcctttcctgcctagtgtttcttccaagcactctccaccctccatctctccatcttttggcttgaggagtctgaaatcgagctctttatttggagaatctctaagagtggcatccaaatcaacacaaaggtttcaaagacaaagaatacttcactcgtgaccagatgtgaaattggtgacagtctggaagaattcctcacaaaagcaacaccagataaggggttgatcaggttgttggtgtccatgggagaagcattaaga

SEQ ID NO: 3073 - DNA, 287 bp, Glycine max
  unsure (1)..(287): unsure at all n locations; Clone ID: 700557202H1
gtcaaacttgagttcaaacactctcatcttcttattcttctgctttcactctctgactcaatcgttctaatccacaaaaaatgaccttaaattacaacattgccctcgccttctctgcggtgctcacnctgctcctctttcccctactgaccgtagggagctcgtggaggagcagccactagtcctcaagtaccacaacggccagctctgaagggccgcatcaccgtcaatctcatctggtacggcacttcaccccgatccaacggtccataatcgtggattcataa

SEQ ID NO: 3074 - DNA, 227 bp, Glycine max
  Clone ID: 700557203H1
tggctctcgccgtttccactacttcttcctcttcagcagctgctgcagcttctagctccttcttctctcgtctcggatcttcctccgacgcaaaagctcctcaaatcggttcgtttcggtttccggagaggtcgcttgtttcgtctgttgttgtcatgtaactcaacgacgctccttggtgaggccactcaacgccgaaccgcaaggaacgattctattgttctctt

SEQ ID NO: 3075 - DNA, 286 bp, Glycine max
  unsure (1)..(286): unsure at all n locations; Clone ID: 700557204H1
ctggaatctacaaaccaacagatgaacctccacatgttgaaggggatgttgttaaagcagatgctggtccatgttgaagtggagaaatacattgaagaaacttatggaagttgggcagtgttccggccacagtacatgattgggtctggcaacaaaaagactgtgaggagtggttttttganaggattgttcgggacagacctgtgccattcctggctcgggactgcaactcataacatagctcatgttagggattatcttcatgcttactcttgctgttgagaat

SEQ ID NO: 3076 - DNA, 281 bp, Glycine max
  unsure (1)..(281): unsure at all n locations; Clone ID: 700557205H1
gaacaagtagttgagaactaagaaggagaagcaaatggcttcctcaatgatctcttccccagctgttaccactgtcaaccgtgccggtgccggcatggttgctccattcactggcctcaagtccatggctggcttccccaccaggaagaccaacatgacattacctccattgctagcaacggtggaagagtgcatgcatgcaggtgtggccaccagttggcagaagaagtttgagatctttctactgccagacttgatgatgcacattggcaangagtaga

SEQ ID NO: 3077 - DNA, 291 bp, Glycine max
  Clone ID: 700557206H1
atctaccgagggttaaacatttagcatatttgctgagggggtacctttgtagacactacatactatccataatatggtcgaaaacaatccagcaagggtttttggttcttctatgtttctatgtttgcttgtgttgatcacttggaacaacattgtgttgttgttccacaagctgaggctcgagcattctttgtttttggtgattcgctagttgacaatggcaacaataactacctattcaccactgctcgtgccgactcatatccttaatggaattgactatcccactca

SEQ ID NO: 3078 - DNA, 114 bp, Glycine max
  unsure (1)..(114): unsure at all n locations; Clone ID: 700557207H1
gcgaanagaaagattaaagttcctttcgtctcctcaggggaaggatgagtactccaaatgggtggttggaagccagagaagtctccttgaggtgatggctgagtttccatcagc

SEQ ID NO: 3079 - DNA, 290 bp, Glycine max
  Clone ID: 700557210H1
gtgctttttggtgcttctattggcatctctctttgacctcaatggatatgaaatcatatgatatggacatggatatgaaactttttaacacatacagaatataacgtgatgctttgcagcaattcatagaagttgtattgcaactgtaattagattactgtaggttaggcaaatgaaaatgtatttagaattcccattattactgctttcttccaggctcagttttcacagatgaggcctgttgcaataacgccttctgttgcgccccgtatgcctctctaccctcctgg

SEQ ID NO: 3080 - DNA, 293 bp, Glycine max
  Clone ID: 700557211H1
tggtaatggcagcgtcactacaagcagcagctactttcatgcaacccaccaagttgagtaggagcaacactttgcagcaaaagtctactcagtccatttccaaggcttttggtttggaacctgttggagctaaaaaggtcacatgctcccttcaggtgatcttaaggacttggctcacaagtgtgttgatgctaccaaaattgcaggattcgcccttgccacctctgccctcgttgtctctggggcaagtgctgaaggtgttccaaagaggctaaccttcgacgaaatccaga

SEQ ID NO: 3081 - DNA, 290 bp, Glycine max
  Clone ID: 700557212H1
gtagaagcctgtcgaacagtgaattgtaatagtggtaaaatgaaagaatgaatgggtatatatatgtgtgggagtatacagatatagatatagatatggtggtgcagctgtggtgatttggcattttctggtttttgttcggtgctgttggtattgttggtttgttggttccatttgatgtttacatagaggagctagcttagccactttcggcaaaagaactcacagagatactttacacaaagaaagaacgcgtttactgtttagagaccaaaccccatcttttgtac

SEQ ID NO: 3082 - DNA, 273 bp, Glycine max
  unsure (1)..(273): unsure at all n locations; Clone ID: 700557213H1
gcttctttccctctcttcgtccantgctctgtgtcgccnnnacacaaaaagggaagaacnagaaagaaccaccccacccaacaacagcttttgttcttcacaagacatagcttcgtgtgtgtgtttcttttcttcctccagcttggaaagactgaagtctctgtctttttcaggttttgggggtgttgttgaagatgttggtagcaaatagctttgatctatggcgaaaggacggttttttctctgcggcggaagaggtgcaggaatcagctg

SEQ ID NO: 3083 - DNA, 195 bp, Glycine max
  unsure (1)..(195): unsure at all n locations; Clone ID: 700557215H1
aatgaactccatagccttcaaatccttcgtnngcntccgccagtnctcgccggaggccccacatttcgctgcccagtncccgcnccgccactgccccaccgcaaattccgcgtcgtggccggaaaattcagccccaggctgaacggacggaacctccgcgtgcggtggtgggcggcggtncgccggaggagccgc

SEQ ID NO: 3084 - DNA, 196 bp, Glycine max
  unsure (1)..(196): unsure at all n locations; Clone ID: 700557216H1
ctctccaaacccactgtttcagtttctggctaacacccctctntcagtgcccccatttcttcaagctcaatgtgttagggtttccctccttttctcagagcttgcatttcccagctagacaagaagancccatctgggtgcttcaatacgctcnaggatctggcaaagctccatttngcgttgagtttnacattgt

SEQ ID NO: 3085 - DNA, 135 bp, Glycine max
  unsure (1)..(135): unsure at all n locations; Clone ID: 700557219H1
caaggcttgatcttcagcacgtcttttgttaggcccccccttttttaaggtttaattgcactttttacctcgaatgctgtaatttatagtgaatnttacttatctccaacaaattaccttggcgtattttattcc

SEQ ID NO: 3086 - DNA, 288 bp, Glycine max
  Clone ID: 700557220H1
tttgctcgactagaagtgcttaacatttctggaaaccgtcttactgatgcatgtggatcttatctttccaacaatcttaaaaaactgtacagctctttgtagcttgaatatagagaactgttgtgtcacatctagaactattcaaaaagttgggatgcattggactcaagatctgtacttgcccatctatgtataggatacaacagcccggtatctggaaatgctataattaatcttccgtccagactttctaccctgaaaaggttttctgagttgaatatgagtggt

SEQ ID NO: 3087 - DNA, 288 bp, Glycine max
  unsure (1)..(288): unsure at all n locations; Clone ID: 700557221H1
gcctaagcttaaatggcgtcgtttttgtcttctctccctgccgtttccgctcgtcccatccccactagtgccttccctctcagaaaacctctctttcaaactccacccaccttgcatttcaaaaatcataggtttgccgttagctgcagttaccagaagcaggtgtcaacgctgattctagctctaacaccatagatgtngtggctgatgtnagaagtgaacggatngtagtctggggagggaaatggttngtggttcggccaatatgaagggnagaatgtccagggg

SEQ ID NO: 3088 - DNA, 285 bp, Glycine max
  unsure (1)..(285): unsure at all n locations; Clone ID: 700557222H1
aattcatattttatcattatcactgatatgaattgcctattgcataattaaacgaactagatgatgttacatnncnaagtcaagtaattaaggagagttgaacgattatattgaatagttaatatgtgcattttttcacttacccgaacaaganaagntccaaccctggaagtgctctccacatgtagacgtnttcatatgacgaatttttggccaatcctcacggatctctccaacacacctngctntacaacttgcattcgaattcgcaagtttcaaagactt

SEQ ID NO: 3089 - DNA, 282 bp, Glycine max
  unsure (1)..(282): unsure at all n locations; Clone ID: 700557223H1
ctttccttgctctccttgtgagtcataaagaagatagttaatanntatctatcttctttccttgctctccttgtgagtcataaagaaatgaagatagataaatattaactattaagtggtgtgtgtgacaacatagaaggactagccaacaccttatttatgtttattacaacagaaaacgaagagtatatatattttgcatctaaccnccaggaatgttanatgaattaactaataatgacaatatgcattatattcatgtaaggaaccatactaaaatct

SEQ ID NO: 3090 - DNA, 192 bp, Glycine max
  Clone ID: 700557224H1
cttgtcattactcaaattggaaacattatttgaagctatcaaacaacaatctttcttctatcaaccctcagccatggtgttttctttcaaccaaagcttctgcctttcttcttcgcttctccttctcctcatggccctctgtgtttcttctcttctgacaccgttttcaactctcaagcagcgcataccgct

SEQ ID NO: 3091 - DNA, 287 bp, Glycine max
  unsure (1)..(287): unsure at all n locations; Clone ID: 700557225H1
gtggcatgtgccattactacatcatagtcatttcctattttctctttcagagatctgagctccaacatgttaacaggttcaatcccagattcatttcaggatttgggaaatctaaattacttgtttctgactaacaattctctaagtggaccattcctgattggatactgagcataaaacagcaaattgatttatctttgaacaatttcacaaagacttctgcanataattgccaaaggccggatctgaattagcttcaagcctctctcgcacagcaagcacttcat

SEQ ID NO: 3092 - DNA, 291 bp, Glycine max
  unsure (1)..(291): unsure at all n locations; Clone ID: 700557226H1
atccaacagaaatcaagtgatgaagtcccaagacttgccggaaggatgcgtcgcacacatattgtccgtacatttgtactcctgaagacatagtcaggctctccctcgtttccaaggccttttattctgcagctgattacgacactgtgtgggangttttataccctctgatttctcctctaccatttctccactttcttcctctaactctaagaaggatctctatttcactctctccgaccgtcccaccatcatcgaccagggtagaaagagctttcaattggaaaagcg

SEQ ID NO: 3093 - DNA, 280 bp, Glycine max
  unsure (1)..(280): unsure at all n locations; Clone ID: 700557227H1
ggtttctttcacttcagatttggttaattagggttccgttggcgcgagtaagaacgaaggaagtagaagcagcaaaacccaatcaaagaccctcactctcaccccacacttcacgtaagtgaaaacgattttgttgttgcagcanaaatgtgttggaagccaaagaaaatgctggttccattaaaacaacagcaaccgatactgctctagaaaactttaagcagaagtgggattgtttagagtagctgtgatcaagccgaggagtttgtggagtctgtga

SEQ ID NO: 3094 - DNA, 293 bp, Glycine max
  unsure (1)..(293): unsure at all n locations; Clone ID: 700557229H1
atttcctgaagtaaacaacctcctggaattacttctggaaattgtcagtatggtggctcaaatcagaacctggagaatatgattggtacagtcatttgtcagtatggacaagttacaccaaaattatcnaacagtcaatgtggactctacctgttctggggttatctccaaccttaagtctgagggacatggtaatgttttcacttctttgttctatggcacaatctggtattcaccctatgtccgagtcccaaaactgtctgccagaatgagagtctccctttcccacaagt

SEQ ID NO: 3095 - DNA, 293 bp, Glycine max
  unsure (1)..(293): unsure at all n locations; Clone ID: 700557230H1
ggcctctgtttcagccacttctctcaggttccaaccctttctcaagttgtctacaaggactacttccccaggggtgttacaaaacttcaagtttgggggcagtttctgtgggatggaataggagaacctttccctctttgagatcctcccgtttacgatttgtgcagtcaaggcacaaccggagacagtgcagaaggtctgcgatattgtgaggaaacaattgctctgcctgctgaatctgagcttaccccagacaccaaattttcagcattggtgctgattccttgacangg

SEQ ID NO: 3096 - DNA, 206 bp, Glycine max
  unsure (1)..(206): unsure at all n locations; Clone ID: 700557232H1
cttcaaacattttgccttttcagctttcattgcccaaccttgtantgtggccttgctgttttctcaatgagaaaggctttactctgcaacgcgcacttttgcgcttctctgttgcgttgttgctggttgccagcttcacttgtgctacttctgttatgcaataactgaagtttcagggnatgaagtgaatacagatgggaagctgt

SEQ ID NO: 3097 - DNA, 196 bp, Glycine max
  unsure (1)..(196): unsure at all n locations; Clone ID: 700557233H1
cctttctcttctcttcttgtttncaacactttttctgtctngtnttctctccaaacatgttgtgntgaagtgttgaaatttgaaaccttaactattntcattcatctgnncttggcatgtatnaatgctgaaatgaataccatattagacttggaagctttagagattgaagagggctctcctaggagtcaagggt

SEQ ID NO: 3098 - DNA, 280 bp, Glycine max
  unsure (1)..(280): unsure at all n locations; Clone ID: 700557234H1
cgcantgctgttattcgcaccgcaaacaaacagtgagccatggccgtcggaaagaacaagcgcatctccaaagggaaaaagggtggcaagaagaaggcagctgatccctttgccaagaaggattggtatgacattaaggccccttctcttttcaagtgaaaaatgttggcaaaaccctcgtctctcgtacgcagggtaccaagattgcttctgaaggacttaaacatagagtgtttgaggtctcttggcgatcttcaggggtgaggatctgcttcaagaa

SEQ ID NO: 3099 - DNA, 237 bp, Glycine max
  unsure (1)..(237): unsure at all n locations; Clone ID: 700557235H1
ctctttcnctctttctagttcgtgttcttcgtcgcaaatccgaagtaggatctctcttgtntnttctctaggtttttcgcgatggcgtcgaagcgaattttgaaggagcttaaggatttgcagaaggatcctccaacatcttgcagtgccggcctgtncatgaagatatgtttcattggnaanctaccaantattggtcctccaganagtccctatgctggaggtgtttccnatgac

SEQ ID NO: 3100 - DNA, 284 bp, Glycine max
  unsure (1)..(284): unsure at all n locations; Clone ID: 700557239H1
ggaaatggagaagaggaagaanaagaggntcatgagagagnaagaagagagtgaaagagtgaagaacaagagactaaagggtgtagaagaagaagatggtagtgatggtggtgttcccacggangaggangtggaagagttttttgccatataagaaggatgagtgtcnnctntgaagtatttgatgacaaagggagtggtggcaaggagtggcggaaggccctcgagacggcggacttcacggtggaccaccgccacgactcgttggcgcccgagaggatgac

SEQ ID NO: 3101 - DNA, 282 bp, Glycine max
  unsure (1)..(282): unsure at all n locations; Clone ID: 700557240H1
cgatgcggacgatgttctcatggtgaacttcgcgttcaagctgaacaagattccggacgagagcgtctccccggaaaaccctcgggacgagcttcttcggcgcgtgaagagactcgcgccgcgcgtggtgacggttgtggagcaggagataacgggaacacggcgccgtttttggcgcncgtggcggaaacgtgtcgtattacggcgcgttgttggagtccatgaggccaccacggtggggaaagataacagcattaacaattcagaccgagtcagactcga

SEQ ID NO: 3102 - DNA, 285 bp, Glycine max
  unsure (1)..(285): unsure at all n locations; Clone ID: 700557241H1
gattggtgttgggcttttgcgcaggaacatagtcaacactcaacataggatagatagtttgttcgttgcgttgccatgtcggcgtcggagattcttcgggaactggattcgctgaaggacgaaaagaccaaaattgagcacaaaatctctcgcttgaagctcaactcagagagattaatctccaaaacgacgccgcacctcccaatgcttcttcttcttcatcgtaccccaccaacggattgacccaggacatgattcacagatacagtcgcnacttgtgctcct

SEQ ID NO: 3103 - DNA, 283 bp, Glycine max
  Clone ID: 700557242H1
caagcccagattcaaccagttaaacttggaacccaaggctttgaggtactattaactacattacttgctcttattttgataattgatacaattaatctcattctaggtttcaaaattgggattcggatgtatgggccttactggagcgtaaatgaccctctccaagaacaggatggcatatctgttatcaagtatgcgttcagtaagggaatcacattttttgatactgcggatgtttatggagccaatgctaatgaactttggttggaaaggcttgaagcag

SEQ ID NO: 3104 - DNA, 231 bp, Glycine max
  unsure (1)..(231): unsure at all n locations; Clone ID: 700557246H1
gtgtggactcaaggtgtgtcaaggcttctatctattgctgcagagaggaacaacagaaacannatataaatatataatgaaaaattattgaggagatggtagtaattaagtatgatatgatataattaattaatgaacatggtagtagatctttgatacatggtggggttggtggggttttaatccaatgtaaaaatgggtaaattaaattgaagttcctctagttatgcc

SEQ ID NO: 3105 - DNA, 285 bp, Glycine max
  unsure (1)..(285): unsure at all n locations; Clone ID: 700557248H1
caagattnttcccantaaactatgggtnacatcncacaaatcacctgntgattnngctgccattncgagaggggacgaangaganagcaacatatcatctcngaccanatcccgttcattcaggcagtgntcanttctctgcgcctcctgacttattcactcccaantccagaaccatcatcgtcnctatggcacaagcacacgcnctattttcactntcaatcctcgcttctncctgcttnctcncccattctccgaaggcgnttcttttcccttcnatngtcg

SEQ ID NO: 3106 - DNA, 273 bp, Glycine max
  Clone ID: 700557249H1
caaggttcctctcattcttggtatctggggaggcaagggacaaggaaaatctttccaatgtgagcttgtctttgccaagatgggaatcaaccccatcatgatgagtgctggagagttggaaagtggaaatgcaggagagcagcaaaactgatcaggcagagataccgtgaagccgcagacttgatcaagaagggaaagatgtgtgctctcttcatcaacgatcttgatgcaggagtggtcgtcttggtggaaccacccaatacatgtcaacaa

SEQ ID NO: 3107 - DNA, 71 bp, Glycine max
  unsure (1)..(71): unsure at all n locations; Clone ID: 700557250H1
gcagnatgttgccagattcaacaggcattccgcagcaacttgaaccttcagaatttcccnccacaacatca

SEQ ID NO: 3108 - DNA, 281 bp, Glycine max
  Clone ID: 700557251H1
catcactgcttcagcagaatattaagtcacggttgatacttaggaatcctgacaaagccacagaactgtttggtgaacaagataaggagaaactgcaggtattcaaaggagacactaggaagcagggagatttggatccatccatgtttagggtgtcacacacgtgatttgctgcacaggaacaacagcttttccttcaaggcggtgggatgatgatatacaccagaaagagttgattggatgggagtaaagatctagtatctgcatgccttcccccagtg

SEQ ID NO: 3109 - DNA, 125 bp, Glycine max
  unsure (1)..(125): unsure at all n locations; Clone ID: 700557253H1
tcaatattgggagtggaaaagcctgncanagtcaaggtaaacttttatttcactctccctttttnnttttattgatgaattgnttntttcaaaangtttngcttgncttnaatttgtgccanaaa

SEQ ID NO: 3110 - DNA, 283 bp, Glycine max
  Clone ID: 700557256H1
gtcttgttgagaagtgcaatacaaggatggcaggcactctctttcgtttattcgtgattcttctagggcttctcatcttgtgtgcttgaaagcagtcccagttacaagaactgaaaaccttatgcaaggtcaagttcaccttactctgggaacaaccacaaggttatcacggagagaaacttgcactgggaggaaccaaccattaccgagaggatggaattggaatccacgactattccccatcagggcctaatggtcgtcacactccaagagcaccatagtg

SEQ ID NO: 3111 - DNA, 280 bp, Glycine max
  unsure (1)..(280): unsure at all n locations; Clone ID: 700557257H1
tcctctaaaggggaaggtggtgtttggaatctgggaaaatgggtttgttttctgggatttttatgggggtgttgttcggcatcgcattgatggctggatgggcgcgcatgatgaagtaccgaagtgccaaacgaattgcaaaggcagcgacattaaactccttggatcccttaatagagatgatttgnagaaaatttgtggtgataattgcctgagtggatatctttcctgtatatgaacaggtgaaatggctaaacaagaaactgaccaaactttggcc

SEQ ID NO: 3112 - DNA, 90 bp, Glycine max
  unsure (1)..(90): unsure at all n locations; Clone ID: 700557259H1
aaaccactgaaccaggataatctgtcttncactcttgcaatccgaacttagattgttttactgttaactcccattcctaggtaccatctg

SEQ ID NO: 3113 - DNA, 285 bp, Glycine max
  unsure (1)..(285): unsure at all n locations; Clone ID: 700557261H1
cgtgaacctcaccgagttgctcagtgttnctggtccatttcacaccttccttggataccttgagtccaccaaagtgattgacactttccaaaaccaagccancaacactgaaganggaattaccatctttgttcctaaggacagtgccttcatgctgnanagaaaactgtcctatccancctcacctctgaccagnnaaagcagtgatcctcttccatgcctgccacatttctattcnctgctgagttcacaagcctagccaaaccagctcctactcccacattt

SEQ ID NO: 3114 - DNA, 224 bp, Glycine max
  Clone ID: 700557265H1
ctcagccgctgcgaggcgaacagagagacccgaagccagatttcaagatgaagttcaacattgcgaatcccaccactggttgtcagaagaagctggagatcgatgatgacctgaagctacgagcattttgggacaagaggatctcacagaggttgttggtgatgctctgggtgaggattcaaaggctatgtcttcaaaattactggaggttgcgacaagcaagg

SEQ ID NO: 3115 - DNA, 281 bp, Glycine max
  Clone ID: 700557266H1
gttttttttctttaaaaaaatcattttcctttaaacttcaaatttagagttctctctctgattcatccccagcaatggcttgtgcattgcaagcaaccttagcagccaacgcctatgtcttttcttccaggagattctccttgaagtccaaaagaacagtaagagaaggttttctttgttcactgttagagttgattctgatgaatctgattgcaatgaggaagaatgtgccccggataaggaagtagggaaggtcagtgtggaatggttagctggggaga

SEQ ID NO: 3116 - DNA, 226 bp, Glycine max
  unsure (1)..(226): unsure at all n locations; Clone ID: 700557267H1
atcctctnctttctctctctaccattgcnatggatccctacaagcaccggccatccagcgccttcaattctnccttctggactacaaattctggtgctcctatttggaacaacaactcctctttaaccgttggagctagaggtccaatcctgctggaggattatcatcttgtggagaagcttgcaaattttgatagggaacgtatcccagaacgtgttgtccatgc

SEQ ID NO: 3117 - DNA, 278 bp, Glycine max
  unsure (1)..(278): unsure at all n locations; Clone ID: 700557268H1
cagaggattcgctccaacccctatcgagtaaggtatnntctgtcaatttacattcgaaagggttaggctattgaattttaaataattacagataaaataatcgatagctttgattttaaaaattaatcataatcatcggttaggttnaacataatactaattcgctaattttttaactgcgcctcagagtatcataacatattctattaaattaataagcggtgatgtaataatattaatatgtagttttgggcaatcnttattgggcagaagagcta

SEQ ID NO: 3118 - DNA, 198 bp, Glycine max
  Clone ID: 700557269H1
tattggagtaaccacaacattttatatgctttgtggcttcatgggctatgctgcttttggagattcagctcctgggaacctgctcacaggatttggtttttttaacccatattggctcatagatattgccaatgctgctatcgtaatcaccttgtgggagcataccaagtttatgcccagccactctttgccttgtgg

SEQ ID NO: 3119 - DNA, 277 bp, Glycine max
  Clone ID: 700557271H1
cttcctcttcctcagtagtgcgattttcgattctcttctctgcaactatgcctaaccctaaggtcttcttcgacatgaccatcggcggtcaacctgccggccgcatcgtgatggagctctacgccgacgtgactccgagcaccgccagaacttccgcgcgctctgcaccggcgagaagggcgccgggcggagcggcaagcccctccattacaaaggctcgtcttccaccgcgtgatcccgaattcatgtgccagggcggcgattcaccgccggaaag

SEQ ID NO: 3120 - DNA, 277 bp, Glycine max
  Clone ID: 700557272H1
taagattgcagtagtgctaagtgctaacacctgcagtgaacaatggcctctgcatcagcatctctgctcaagtcttcacttgttcttgacaagtctgagtgggtgaagggacaaacccttcgccaaccttctgcatcagttgtgagtgcaaccccaccaccccatcaggcctcaccatcagagctggttctatgctgatgagctcgttaagaccgcgaaaacagtggttcaccagggaggggtattttggccatggatgagtccatgctacctgtgg

SEQ ID NO: 3121 - DNA, 281 bp, Glycine max
  unsure (1)..(281): unsure at all n locations; Clone ID: 700557273H1
cgcgtttttccttcttcgctagattacccagatctacgacgagtctctgctatgaatcaattcttatcttaatnnnnnnnnnnnnnnnnnnntcattctaatctttccagaatcctcgaatctctccttcgaacgttcagtgatcttgacttgaccgaatgctgttgcggttgaaatctcagaggctttgggatttcggtgtgagaaaatagggcttcgacgattcctttgcttcccttcggactccttctacgccatttggtcccttccttggccgtatt

SEQ ID NO: 3122 - DNA, 281 bp, Glycine max
  Clone ID: 700557274H1
gggtttttgagtgcggtgcggcgatcctagcactctcttctgcagctttcgccgacagcttcattcaccatggctgagcaaaccgagaaggcttttttgaaacaaccaaaagtgtttctcagctcgaagaaaactgggaagggaaaggacccggaaagggtgggaaccgcttttggaaatccattgggcttggatttaagactcccagggaagccatcgaaggaacctacattgacaagaagtgccccttcatggcatgtttccatccgtggccgtatctt

SEQ ID NO: 3123 - DNA, 282 bp, Glycine max
  unsure (1)..(282): unsure at all n locations; Clone ID: 700557275H1
gacactttggggtgcaaggctttggttattgtggaagatactaatgctgttcttcctgctttggctgcctcgttttttaaacaaccttccaccaaaatggctgtgnntcgcgataactgggacttatggcaaaacgaccaccacctgttgattaaaagtttgtatgaggcgatggggctgcgcaccggtatgttgaactcggttgcttcatatgtacatggggataataagatggacctgggtaacatggtgccggattctgttttggttcagaattgatgg

SEQ ID NO: 3124 - DNA, 285 bp, Glycine max
  Clone ID: 700557276H1
gaaaggaacattttggtagggtaaaaaagtatctttgtaaagttggatgcactttctagtttggtttgagaaaaggggatatgctaccaacctggaagtattatagcattgatttcaccacttcagtatgtgatctattttttttcagggtgcattaataataaacatattgatgttatgatataagaagaaaaatggagcatgttttggagaaaagatttcctcttaattcagaagattacaagttatcatgaagaagttggtgaaggcgttagtgcctccgta

SEQ ID NO: 3125 - DNA, 284 bp, Glycine max
  unsure (1)..(284): unsure at all n locations; Clone ID: 700557279H1
attcaaccttcctcgcctttgcctccgtttccgtgactgagatggctggaggtgttattcagcagatatcgaggaggaaactccaccctcggtttactaactctcccttgttgtcacccatcgtagcaaaaaaagatgatgctggctctatggcagtcagtccttaagagcacttgcattaattgganntggtttgtcaggtcttttcagtttttcaacaatggcagcagctgatgaagctgaacaggctggcagtccaagctatccaggctcacaagggattc

SEQ ID NO: 3126 - DNA, 295 bp, Glycine max
  unsure (1)..(295): unsure at all n locations; Clone ID: 700557280H1
caaaacagcagagagaagagaagggctacacaaacacaatctctaatggcactcaggatgtgggcttcttccactgccaatgcactcaaactctcttctgtctccagaccttcatctcttggcctcctatttctntctcccagatgcttatcttcgtcttgggatggacttaagtacgtgattcacatgaatgggtcaagcacgaangctccagtcgccaccattggtatcatgacnatgcccaggaccatcttggngaggttgtgtatgtggagctgccagaaccaggtggcac

SEQ ID NO: 3127 - DNA, 276 bp, Glycine max
  Clone ID: 700557281H1
aacagaaacaaaagtggcagtattaggtggcatcaccgaagtgcagggagctgccaacagcgtcgagatcaacaatctcgctcgctttgctgtagaggaacaaaacaaaagagagaattcagttctggagtttgtgcgggtgattgtgcaaagcagcaagtggttgctggagtgaattactacataacattgggaagcaaagatggtgagttaaaaatgagtataaagcgaaggtttgggagagggattcccagagttgctagaatcagccaacat

SEQ ID NO: 3128 - DNA, 279 bp, Glycine max
  unsure (1)..(279): unsure at all n locations; Clone ID: 700557282H1
cngcagctgccgccgctgctcgcaacaagaccccatcaacaagcaanggcagtgtttactctgataacctcntgnctacatcttcaatggctaataagtttcccagtgccgtatccgcatttcctcaaagccttgtacagagcagtaacaccgttgctcagtcacctcagtggaagaatctgtaagggcaacgaccattcacagtcgcccccatccatggcttcaacaacacgccctcatcagtcaaaaacttccanagcagcaggctcgttcccagca

SEQ ID NO: 3129 - DNA, 279 bp, Glycine max
  unsure (1)..(279): unsure at all n locations; Clone ID: 700557283H1
gcacatttgcaaagtgttatttttctttttttctcatttgcactgcaaattgcaatggcttccaacaaggttattgccaccatcatggtgctttctctccttgcctactcaacatcattcaccaatgcatgtggcacatgccaccaaaannnnnnnnnnnnnnnnnnnnnnnatcaggaaagtgccctaaggacacattgaagctaggggtgtgtgcagatattctaggtcttgttactgttgttgttggctcccctgtctccagcaagtgttgtgcnt

SEQ ID NO: 3130 - DNA, 279 bp, Glycine max
  Clone ID: 700557284H1
ttcaaaatcaaaaacaccaaatcctctaattcaagtttgcaccaagttttcctgagaaaatgtctggtcgtggaaagggtggaaagggtttgggaaagggaggtgccaagaggcacaggaaggttcttcgcgacaacattcagggttacgaaacctgcgattcgtaggttagcgagaagaggtggcgtgaagaggatcagtggtttgatctacgaggaaaccagaggggttctgaagatattcttggagaacgtgattcgcgatgctgtgacttatacc

SEQ ID NO: 3131 - DNA, 281 bp, Glycine max
  unsure (1)..(281): unsure at all n locations; Clone ID: 700557285H1
gttgcaactgcagttgcaacaagtactcttttgactacgttgagaagatcacaaatgagactctagttttgggtgttgggacggtgaaggcccaattcgagggtgctgaaatgggtgttgcagctgagaacggtggctgcaactgggatcaaactgcacttgcgacccatgcagctgcaagtgagatcaacatgccataaccttcaaacacaacacatacttattnatttattgatacatgtattacagctatcaataaataataagtatgtgttgtgttt

SEQ ID NO: 3132 - DNA, 280 bp, Glycine max
  unsure (1)..(280): unsure at all n locations; Clone ID: 700557286H1
ttttatgcttattttnttccccctttctcttatgagtggggaaaagtgtcggtttggctacnnncngaatccaagtgtaccatatatctgcttagggaagagtacgaaattgttccaaaaccaaatgttgcagagcctgccaagggggtgtacaagatgagcctcttttggtttctagttttctctgcacatcttgcactagcatcctctctngtngaatttcaagatnaatgataatccaaggcaaaagcaagagggcatgccagctaaatttgtacat

SEQ ID NO: 3133 - DNA, 278 bp, Glycine max
  unsure (1)..(278): unsure at all n locations; Clone ID: 700557288H1
gagaaaaagaaaacaaacagagtagcttcgtctaagagaagtggcggtgaagttgagactcaagaaaaacactcttagtatttatatatatccgagaaagggagagaaagaagaagcagcaatagacactactcttaggtatttatcttatcattaccgttattatcatgagcactgaaaaggagaaaannnnnnnnnnnnnnnnnnnnnnncttcacttccgtcgagtctgcaagggtgtcatggcctcgagaagattcttctccgcgaatcgcgtg

SEQ ID NO: 3134 - DNA, 242 bp, Glycine max
  Clone ID: 700557289H1
cattttccctctgcccttttctcgatggacacggacggtgtcgtttcgttcaaccatgtctcgccggaggattcccacgaggttcatgtcttggccgtcgacgacagctcgttgatcgaaaggtcattgagcgcttgctcaaaatctcagcttgtaaagttacggctgtggatagtggaatcagagcactgcaatttctggggctggatgagcagagaaggacctctgaatctgatggtttt

SEQ ID NO: 3135 - DNA, 245 bp, Glycine max
  unsure (1)..(245): unsure at all n locations; Clone ID: 700557290H1
cattttcncannagcccttttctcgatggacacggacggtgtcgtttcgttcaaccangtctcgccggaggattcccacgaggttcatgtcttggccgtcgacgacagctcnttgatcgaaaggtcattgagcgcttgctcaaaatctcagcttgtaaagttacggctgtggatagtggaatcagagcactgcaatttctggggctggatgagcagagaaggacctctgaatctgatggttttgt

SEQ ID NO: 3136 - DNA, 259 bp, Glycine max
  Clone ID: 700557291H1
cgagataactagaaacagtgtgatgaaaatgaaggtccttgttttcatccgttgctacaattttggtagcatggcaatgccatgcgtacgatatgttccctctccgaatgaacactggctatgtgcccgtactccggaggtgaaatgcgcaagttggaggcttgctgtggaagcacacaacatctttggctttgagaccattcctgaagagtgcgttgaagcaacaaaggaatacatccatggcgaacaatatagatca

SEQ ID NO: 3137 - DNA, 283 bp, Glycine max
  Clone ID: 700557292H1
gggattttatgcgtgcttttggttcacaaggctcatctactcttcagtcaagattgattagttatagcaaccactggtttggattaatctactacacttctgaaaggatgaagaccggtttgtgtaaggattttgaaattcaggtatgtcatgttcggaatcagatgtaaccttattctatacaattttgaattgtgacgacactgttattcttttgtttcaatatcttttacttgcctgagttatcgaagtataggtttttaaggtgtaccctgcagtctaa

SEQ ID NO: 3138 - DNA, 262 bp, Glycine max
  unsure (1)..(262): unsure at all n locations; Clone ID: 700557294H1
tgtgatggccatttcangttctgcagaatgaatacttcaattttgcagaacaccaccaccccatcacgtgcatgcacccatcatccccacgtgccacttcccttctttgcacactgtctcaccctccaccaccaccgacgtttcttcttcttccatgcaaatttctcagcttctcccacacccatcttggaagaagaacttcttcttccaacacccccaccatcatccatgttgtagatgttacttcgctgctgatgttcag

SEQ ID NO: 3139 - DNA, 287 bp, Glycine max
  Clone ID: 700557295H1
gaagacgcgaaatagggcataggcgacagtgcgtttggctaccctcagcaatcgacctcatcttctctctctctaaccatcgtatctgcaacttcaactaacttttatgaagccgaagggtccagtgaatcgaccccccacaccagatgggccgaaaatgcccctgaaagggaacccacgcttcaagagctcatcaacatcaagttgatcgagaccggagagaaggagcgtctcatggagctgttgagggaaaggcttgttgattgcggttggaaggatgaatgaaa

SEQ ID NO: 3140 - DNA, 92 bp, Glycine max
  unsure (1)..(92): unsure at all n locations; Clone ID: 700557296H1
acnngttctagatcgcgatctagaacnactcagtctatccaaattctccagccatggcagtttcttctgcatctgcttcntccaaacttata

SEQ ID NO: 3141 - DNA, 302 bp, Glycine max
  unsure (1)..(302): unsure at all n locations; Clone ID: 700557301H1
ggccaccagagcttttgcttggngccacttattatggcactgctgtggatttatggagtacaggttgcatacttgctgagctgtatgcaggcaagcctataatgcctggaagaactgaggtggagcaattgcataaaatttttaaactttgtggttcacttctgaggactattggagaaaatcaaagttgcctcatgcaacaatatttaagcctcaacaaccctataggcgatgtgtttctgaaacgttcaaggagtttcctgcacctgcaatagaattgatagagatccttttgtccatag

SEQ ID NO: 3142 - DNA, 300 bp, Glycine max
  unsure (1)..(300): unsure at all n locations; Clone ID: 700557302H1
ctcattcttcatccatagacatggccaccgtcacttctgcagccgttgctattccctcattcactggcctcaaggcaagcgcaggcaaagtgagtgccgcagttaaagtctcagctccccaagccacaaggttgggcatcaaggcttcgctgaaagagttggagtcgctgttgtggccactgccgcgagtgcagtgctggctagcnnccgccatggccattgaagtgttgctgggtggtgatgacgggtctctggctttcgttcccaacaatttctccgtggcctctggggagaagatcg

SEQ ID NO: 3143 - DNA, 294 bp, Glycine max
  unsure (1)..(294): unsure at all n locations; Clone ID: 700557303H1
aagagacccagcagaccgacaaggacagatggaagggtcttgcctatnatatctcagacgaccaacaagacatcacaagaggaaagggtttggttgactcccttttccaagctccacaggatgctggaactcactatgcagtcatgagctcctacagtacctcagcactggacttcgccagtacttggacaacaaaatggatggattctacattgctccagcttttatggacaagcttgttgttcacatctccaagaattcatgaccctgcccaacatcaaggttcctctcatt

SEQ ID NO: 3144 - DNA, 290 bp, Glycine max
  unsure (1)..(290): unsure at all n locations; Clone ID: 700557305H1
ataaaaccagaacccctctccttctcttgagcgttcacacaaccttttcacacctttcttcatttcacatggaaatgcagctccctcgaagactattcttccttcttcttccctgatatggatcccaagcntcgtggaaacgacaccgctttcacgacctcctcaattccctcatccacttagacaacaaacaaaccctcatggatcctactcaattccaattcgactctcccccccaaccaagagactcgtcgtgccattgaagacatccacaatgtcaggtccaacaa

SEQ ID NO: 3145 - DNA, 288 bp, Glycine max
  unsure (1)..(288): unsure at all n locations; Clone ID: 700557306H1
ttatccctctaatcactctagctgttgcaaatttctactatanttcaatggcttctgcagatgttgagttccgttgctttgttggtgggcttgcttgggtcaccggcaacgatgccctcgagaaagccttttcaatctacggcgacatcgtgaatcgaaggttatcaacgaccgtgagactggaaggtccagaggattcggatttgtgaccttcgcctcagagcagtcaatgaaagatgcgatcgcaggaatgaacggccaggaccttgacggtcgtaacatcactgt

SEQ ID NO: 3146 - DNA, 289 bp, Glycine max
  Clone ID: 700557307H1
acgctttctattcctttcattgtttcttttctcttcgttctgaaatttcgtttctctctccaacgctacaatgtcggaagctaagacccaaattgaatccataaggaagtgggtcgtcgagcacaagctccgtactgttgggtgtctgtggccagtggtatttcgggttcaatcgcttacaattggtctcgacccaatatgaaaactagtgttaagatcattcacgcaaggttgcatgcacaggctcttacgctgggagcattagccggagctgcactagtagaatata

SEQ ID NO: 3147 - DNA, 290 bp, Glycine max
  unsure (1)..(290): unsure at all n locations; Clone ID: 700557309H1
gtttgaatagcctatatatgtaacatctttcatatgtattatcttagaatacagaatgccctctgcagcctgctccatatttgtgaatgattaaagattctaccttactttttcattttntgtagtgttgacaaatgacaacagagagtatgttaaaagagaaactgttgtcatttgtcaacactacaaaaaatgacaacagagagtatgtataaaagagaaactgtttttagtgtaaaaatttgtagtttctttacgtctataatacagtgtactttaataaaccttta

SEQ ID NO: 3148 - DNA, 289 bp, Glycine max
  unsure (1)..(289): unsure at all n locations; Clone ID: 700557310H1
agacgcttcgcaaatctcaatcgaatctcagaaaaatgagagaaatcatcagcattcacataggtcaggccgggatccaggtcggaaactcctgctgggaactctactgcctcgaacatggcatccagcccgacggcatgatgccttctgacccaccttcggtgtagcccacgacgcnttcaacaccttcttcagcgaaaccggatctggcaagcacgtcccccgtgctgtcttcgtcgacctcgaacccaccgtcatcgacgaggtccgctgcggcacctaccgtcaa

SEQ ID NO: 3149 - DNA, 287 bp, Glycine max
  unsure (1)..(287): unsure at all n locations; Clone ID: 700557312H1
ctnatgtggaaccangtanctgtagatananananaggacagnngatccgctccactccangtgctgctgcaagcctgcctaatacaggtctaaattgaactgctgtgganngagtgtggngtctnctcanaaggngngtttcactgacctggttcnacagttcaaagtaacaggagnaanaaccacnaagttgtgaatcttggcatggtgnctgataaatacagtgtgtgcaccatatttaaggttatgggcnantctggagatccantgcatgtncagccagctc

SEQ ID NO: 3150 - DNA, 285 bp, Glycine max
  unsure (1)..(285): unsure at all n locations; Clone ID: 700557313H1
gagaacaaagcacttagtgctattcaaatncacgaaaaaccaacagcgagtgttgtttttgtttggtccaggctggaccagggaatgaatagagatgagaggctttcggttgaagagaactgagttaagcggcgaannaagacgcagaatcgcggcagaaattgccaccggaagcacgtcgaagagggtgaaccaaacacaaaattccatccaccacttctcttttcaatccccaactcaaatctgtgaagaaaatctcaatttctaaattgtantcttagcata

SEQ ID NO: 3151 - DNA, 288 bp, Glycine max
  unsure (1)..(288): unsure at all n locations; Clone ID: 700557314H1
acnagcngccgctcgcnatctagaacctcgagcngctgcgagcnnnaccnagcactctctctcaccaaagccttcctagaacgaaaanacnaaagaagagcnantttccctcaccaaagaagaagaagcaaacaatggccgatcaacttaccgataacagatctccgagttcaaggaagccttcagcttgttcgacaaggacggcgatggttgcatcacaaccaaggagcttggaactgttatgcgttcattggggcaaaacccaactgaggcagagtccaggactga

SEQ ID NO: 3152 - DNA, 281 bp, Glycine max
  Clone ID: 700557315H1
tctaaatttatcattgctagcctgttagctttttccttgggatgcatggcttttgtttgtaaagctatggttacttgatttgtcttttgcaggatctgggtccagttacttgtatggtttctttgaccaagcctggaaagagggaataccaaggatgaagccgaggatttagtaaaaaaggcagtttcactggctattgctcgtgatggtgcaagtggtggggtggtgcgaacagtcataataaactcagagggagtgaccaggaatttctaccctggcga

SEQ ID NO: 3153 - DNA, 250 bp, Glycine max
  unsure (1)..(250): unsure at all n locations; Clone ID: 700557316H1
gcagctgccgtactcctcgagaaccgccagttcctcatgctcctcaccacctccgtcgccgtcctcgtcggctgcttcgtcgtcttcatctggcggagatcctcctcccccaaggccagcctctngaaccaccaaagcgcgttatcgagaagcttcccgaaatcgaggtcgacgacggcaccaagaaggtcaccatcttcttcggcatcaaaccggcaccgccgaagtttcgccaaggccatagcggaag

SEQ ID NO: 3154 - DNA, 140 bp, Glycine max
  unsure (1)..(140): unsure at all n locations; Clone ID: 700557318H1
ggttgtggagtggcagtgtttcngagggctttcacatacaaagatttncttatctgcttcatattctnaagaggggatttcacctaagaccttgagagntttngntacntntnnttntngtncntnggggatncccttct

SEQ ID NO: 3155 - DNA, 289 bp, Glycine max
  unsure (1)..(289): unsure at all n locations; Clone ID: 700557319H1
gcgtgtactttcttgccgaaacagaagggcnaaggggcaaacacaacttttntgtttttttgtagagcgagagagaaaaaaaatgttggggatcttcagcagttccgtggtgtcnccnnccggaggagctggtgnctgccggcagcagaacncngcgccgaanacgacggcggggaagcngntgaaccggttcgtggagaacaaggcgtcggcggtgtcgctgcactgggagaacacgtgcattggcttacacgcaccacaagatcaccgtggcatcccagatcnttgc

SEQ ID NO: 3156 - DNA, 278 bp, Glycine max
  unsure (1)..(278): unsure at all n locations; Clone ID: 700557321H1
ttcaaaagaaccgagagtatcgacctttcaaaggacaggcttgcactgcaaangcttcgtgaagctgctgagaaagctaagatcgagctgtcttcaacatctcaaactgagatcaacctgcctttcatcactgctgatgcattggtgctaagcatctgaacataacattgactagatcgaagtttgaggcttggtgaatcacttgattgaaaggaccaaggtaccatgtaaaagctgctagaaggatgctaacatctctatcaaggatgttgatgagg

SEQ ID NO: 3157 - DNA, 288 bp, Glycine max
  unsure (1)..(288): unsure at all n locations; Clone ID: 700557322H1
gtgaatcagcaccacattcacctgagctttttgtgaggattccaaagcatggcttcccttgcagcatccactgctgctgcntcccttggcatgtcagaaatgcttggaaaccccatcaacctcagtggtgccacaaggccagctccatctgctctagccctgcctccttcaagactgtggctcttttctccaaaaagaaggctgcacctccaaaaaaagctgcagctgctgctcctgccaatgatgagcttgccaagtggtatggtcctgacagaaggatcttcttgc

SEQ ID NO: 3158 - DNA, 277 bp, Glycine max
  unsure (1)..(277): unsure at all n locations; Clone ID: 700557323H1
agctatccctctcttgaaaaatctagatctcgtacttccttgatctacgttacgcttttagtgaccggatctgncatggatctgaaccagatctacacgccgatggtggttttggcctggtctttcanctcatctgatgcatgaggctcagatctactgtacagagatactgtagataatcgatgagaagaacgcagatccagccgcttccgcttgttcgatcgctacagacgcttgtatcggattattcagatgattcataagcagcagtctcctc

SEQ ID NO: 3159 - DNA, 288 bp, Glycine max
  unsure (1)..(288): unsure at all n locations; Clone ID: 700557324H1
aggcggaggaggcagcaacccgctgccgcctcgtcagtgcaagacagggttgggagcagcagtgggaatttgagtgtgtcttcaagagagggntcagcttctgcctctgcctctgcgcagaatgtgttgttgggccaactcgatgacgagatactagtgttgcaaagcatttggaatcagccaatacaatnttttcatttgtttggtggantattggattctactgggtatcagctgggggtcaagcattagcccaagactctcctcagctttactggctatgtataa

SEQ ID NO: 3160 - DNA, 287 bp, Glycine max
  unsure (1)..(287): unsure at all n locations; Clone ID: 700557325H1
gaaactggatcagcaaatggcagaagaggaacaattatnttccttcatggggcccctacacaatcttttagctaccgagttgtcatgtctcagttgtcggatgcagggttccactgctttgcacctgactggataggatttggtttcagtgcaaaccacagccaggatatggttttaattacacagaanaggagttccatgatgcattggataagctgcttgaggtgctgggggtcaaatctccctttttcctagttgttcagggatttcttgtaggttcatatgga

SEQ ID NO: 3161 - DNA, 287 bp, Glycine max
  unsure (1)..(287): unsure at all n locations; Clone ID: 700557326H1
gatttctttcttgggatgtgagctactgtattaaaatcggtccctatgcacttgagatgattggcaagaactgcaaactgctagaagggttgtgtcgaaacatgcacccgttggatactgcaancaagcngtttcaagatgatgaagcatagcaattgcctccacaatgcctaagctcaagcatcttgaaatggcttatcatcttatcagcacttcgggtgtccttcaaatacttgcaaactgccctaagcttgaatttttggatcaaagggggtgttggggtgtat

SEQ ID NO: 3162 - DNA, 225 bp, Glycine max
  unsure (1)..(225): unsure at all n locations; Clone ID: 700557327H1
gcttggnattctgttgccctcatcttgatgatagtgatcgatcatgggttggctggaccctgatgtaatttacatatttactatcatattttgttaatgttcttgattgtaggataacattggagttacgttgattgtctgaatgtatgtatacttccatacagaccttggtgatcccttctttggttgttactgtgatatgtagatagtagattaaatttgtgt

SEQ ID NO: 3163 - DNA, 282 bp, Glycine max
  Clone ID: 700557330H1
ctactaagagttgctgcttcttcagccactgccgcacctcgcagcctctgtgccctcaacaaccatggctgaaatcgaaactaccgttccagatcccacccaaatcgacgtcaaactcttcaatcgctggagcttcgaggatgttgagttaatgatatgtctctggctgattacattggagtgtccccatcaaagcatgctacatatgttcctcacactgctggtaggtactcagtgaagaggttcaggaaagcgcagtgccccatgttgagaggctcacca

SEQ ID NO: 3164 - DNA, 278 bp, Glycine max
  Clone ID: 700557331H1
agctttagctggtgatattattgcacttgcaggtttgaaagatactattacaggtgaaacattgtgtgaccctgataatccaattgtgcttgagcggatggacttcccagatcctgttattaaggttgctattgaaccaaaaactaagctgatgttgacaagatggcaactggtttaatcaagcttgcacaggaagacccttctttccacttctcccgtgatgaagagataaaccagacagtgattgaaggaatgggagattacatcttgaaatcatg

SEQ ID NO: 3165 - DNA, 282 bp, Glycine max
  Clone ID: 700557332H1
caagttgggtgggatatgtagccgtttgcgaggacaggagagagataacacgaatgggaagaagagacattgtgatctctctcaggggaacttccacgtgtctagaatgggcagaaaatctcagggctcatatgattgacatgcccgcaacgatagctcagaagaagcccaaggaaagcccaaagtggagtgtgggttcatgagcttgtacaaaacaaaaggagcacaagtgccaagtctagcagaatccgttgtagaagaagtgaggagactgatcgatct

SEQ ID NO: 3166 - DNA, 297 bp, Glycine max
  unsure (1)..(297): unsure at all n locations; Clone ID: 700557333H1
aacgggtggtgcctctcttccatctccccagccaaaacctctctcaggaaggccacattacgcccttccgtcttcgcaacccttaacactccttcttctccttcntcttcatcttccttcccctctctcattcaagacaggcctgtttttgctgccctgcccccatcatcaccccaactgtgagagaggatatggcaaaggaatacgagaaagctattgaaggacttcagaaattgntgagggagaagagtgaactcaaagcgacantgctgaaaaagtggagcagataacagcttc

SEQ ID NO: 3167 - DNA, 296 bp, Glycine max
  Clone ID: 700557334H1
ctctttctctctttctagttcgtgttcttcgtcgcaaatccgaagtaggatctctcttgttttttctctaggtttttcgcgatggcgtcgaagcgaattttgaaggagcttaaggatttgcagaaggatcctccaacatcttgcagtgccggtctgttcatgaagatatgtttcattggcaagctacaattatgggtcctccagacagtccctatgctggaggtgttttcctagtgactattcatttccctccagattatccctttaagccacccaaggttgcattcaggacgaag

SEQ ID NO: 3168 - DNA, 286 bp, Glycine max
  unsure (1)..(286): unsure at all n locations; Clone ID: 700557336H1
ggaaatgatgcaggagtgcaaganatggccaacgaaaaattggagaggaggtgcaggttacatatcaaaggatgtggttgtgaaaggcttacccagtcctagtgatgatactctaatacttgtgtgtggacccccgggtatgatgaaagaatatctggagaaaaggccaaggactgaccacaaggagaggtttctggcatcctaaaagaggctggatacactgaacaaatggtatacaaattctgagaaatttagttttcttgctctgaattccaagcacttgtcc

SEQ ID NO: 3169 - DNA, 288 bp, Glycine max
  unsure (1)..(288): unsure at all n locations; Clone ID: 700557337H1
ctttaaacgccgaagaaagttcatccaanctccgaagcccttcaccgcattgcaaccatgtncgagaagaaaggttagagagccaaaggaagaaaacgtgactctgggcccagctgttagagatggcgaacatgtctttggcgtcgctcgctctttgcctccttcaatgataccttcattcatgtcactgatctgtccgggagggaaacacttgtccgcatcacaggtggaatgaaggttaaggctgacagagatgaatcgtctccctatgctgctatgcttgctgca

SEQ ID NO: 3170 - DNA, 286 bp, Glycine max
  unsure (1)..(286): unsure at all n locations; Clone ID: 700557339H1
gtcaagcgcgtgtgttttgttcattctggatgaaatgaggaagaagtctaaggaggaagggaagagtaccactggagaagggttagagtggggggtgctattcggattcgggccgggtctaaccgttgagaccgtncacncttcacagtgtcccttggagggataaatcatgctgatgcggtgactagtgatttaagagtgatcaataaggaaccctcggaaataccagggaaagtttgttattattactagtttcattgtggatttatcgtagcataatgttgta

SEQ ID NO: 3171 - DNA, 276 bp, Glycine max
  unsure (1)..(276): unsure at all n locations; Clone ID: 700557340H1
aaggcagaaagcaagctcatcctanagttttaaaaatggcagcagcctcctccatggctctcctgcttccccatccttggctggcaaggccgtgaagctgggcccatcagcccccgaagtcgggagggtcagcatgaggaagacgtcaccaagcaggcctcctccggaagcccatggtacggcccagaccgcgtcaagtacttgggcccattctctggcgagcccccgtctacctcactggcgagttcccaggtgatacggtgggacatgctgggc

SEQ ID NO: 3172 - DNA, 287 bp, Glycine max
  unsure (1)..(287): unsure at all n locations; Clone ID: 700557341H1
acaaaaccctgaagaaagacacagccattgtttgttcncctttccattgattgagcgacctctttgtttnntctgcgatcattntccattgggtggaagaaagtctcaacctttagtcgaaagagcaaggntctgagtgagtgagcgatcagtgtggtggtgcgattatctccganttcattccagcgggtcccgccggcggngcgcacgcgtgaccgccgacatcctgtggccgaatttgaggaagcggttctcgaagtcgctgctggacgatgatttcgaggcag

SEQ ID NO: 3173 - DNA, 286 bp, Glycine max
  unsure (1)..(286): unsure at all n locations; Clone ID: 700557342H1
ctggcgccatggcccgaaccgcccatacgtcgtcgtttgggtcancccaagcaacnagctctgcgacgcgcgtggacgaaagcngcgacantgacgcgaattgnncaccaaacgctcacaattccgttgccaccaaagcctctcgaggatcaacgttgtacatcgacgtggtccacgccggctcggaggaggacaccaagccgcttatcggctcggctcggctcaagctggtggacattctcgacgacgttggaatcggcgagcgcgtgaccgcacgctctcgtga

SEQ ID NO: 3174 - DNA, 282 bp, Glycine max
  unsure (1)..(282): unsure at all n locations; Clone ID: 700557346H1
tgttgctattatcatccgcagctgccttnnattcgcaccgcaaacngtgagccatggccgtgcggaaagaacaagcgcatctccaaggggaagaagggtggcaagaagaaggcagctgatccctttgccaagaaggattggtatgacataaggctccttctgtttttcaagtgaaaaatgttggcaaaaccctcgtntctcgtactcagggtaccaagattgcttctgaaggactcaagcatagatgtttgaggtctccttggctgatcttcaaggggatga

SEQ ID NO: 3175 - DNA, 273 bp, Glycine max
  unsure (1)..(273): unsure at all n locations; Clone ID: 700557347H1
gctattcctcactaggagctnccaanccactggttcttcatctgcatgcacanagttgcatagttttggaaaccaagaattcntgaagaagggnagcatcaacaagcagttctgaaaatggagatcaccaatgtcagtngtatgaggctattgcaaagcagaagttgccaaagatggcgtttgactactacgcatctggtgcagaggaccagtggactctgcaagagaacagaaatgccttttccagaattttgtttcggccacgtattctta

SEQ ID NO: 3176 - DNA, 233 bp, Glycine max
  unsure (1)..(233): unsure at all n locations; Clone ID: 700557348H1
tgtaactctccagtgcccttccttttcatatcaaaaatagagatggtaaaccctaacatggganggttggagttccaaatctcactgtaactctccagtgcccttccttttcatatcaaaaatagagatttcttagcatccaggatctgttaatttatggtgccttttccacacctagtctcacgtgcagcataatttattagtaatttggtacaagtagaatctagatcgcg

SEQ ID NO: 3177 - DNA, 263 bp, Glycine max
  unsure (1)..(263): unsure at all n locations; Clone ID: 700557349H1
gctcctcaaaacatacttaagattgggtcacngcagaagttcatgagtaatgatggtaattgtgaggactatggaccctcggcattcccagtggaggaggtgcataagattgctgtgcttgattaagattggctaatgcagacaggcatgctgggaatatattgatcagaaaggaggcagatggccagataaagctcattcctattgatcatggctattgtctaccagataaatttgaagattgctcattgatggctttactg

SEQ ID NO: 3178 - DNA, 143 bp, Glycine max
  unsure (1)..(143): unsure at all n locations; Clone ID: 700557350H1
gcaattcactctgtacaattcttcgttcgttctctgcagttatatcctttttgagcttcaatggcggacgctgaaaccttcgctttccaggctgagatcaaccngcttctaagtctcatcatcaacacattccacacaacata

SEQ ID NO: 3179 - DNA, 265 bp, Glycine max
  unsure (1)..(265): unsure at all n locations; Clone ID: 700557357H1
aatccctttgtttgctcacataagatttgggtttcttcaaattatcttcttntttctcaaaaaaaaaagaagaacaaatctttgtttaattttttgaaggaggttgaagaaagcaaaaggttgttgttttgttttaagttctttgaaatggttttcatgtctgagatattattgttccctgaaaaaaaaattgaggaaggagagtgggagaaggagngataagaagangaggagaagaatacctacccagcaagcaggnttagag

SEQ ID NO: 3180 - DNA, 117 bp, Glycine max
  unsure (1)..(117): unsure at all n locations; Clone ID: 700557358H1
gtttcacattaatcagtaatgctgtatgtatacccaaaaatggtgtaacagtaacgtttaccttcataaaatcagagtatttatgcgagtattanaaaaaaaancacacanangggg

SEQ ID NO: 3181 - DNA, 273 bp, Glycine max
  unsure (1)..(273): unsure at all n locations; Clone ID: 700557360H1
cncnttcgccaccaacctnaanncacancgtacccnccacctgcagaaaacgccgntccntngccnctgtgctccntcaccgcacaancttcgaaccaaacntccgccgttggatntccatcgcttcaacactggaacgcaccaatnggngtgngancgttctcaacgtcttnncctgcgcgacggcganatgtgnaacgtngctgnnttgntccgcgattncgacgctcctggctttcaagaaagcagcggagtcgatggagaagctcatgg

SEQ ID NO: 3182 - DNA, 279 bp, Glycine max
  unsure (1)..(279): unsure at all n locations; Clone ID: 700557361H1
ctatgatcagatgaanngacaagttgttnagttggctnngcaaactttccatccagagttcatgaatcgcattgatgaatatattgttttccagcctctggattccgaacagatcagcanaatagtggagctccagatggagcgctgaaaaacaggctcaagcagaagaaaattgatcttcattacacagaaaaagctgttaaacttcttggtgtactgggttttgatccaaattttggagctagaccagttaaaagagtgatacagcattggttgaaa

SEQ ID NO: 3183 - DNA, 278 bp, Glycine max
  unsure (1)..(278): unsure at all n locations; Clone ID: 700557362H1
ctgatccgcgagcnagggtttgtgaagatgacgacgattcgcaggttttgctgcaacgatcttcttcgctttgccgccgtcaatctcgaccatctcaccgaaacattcaacatgtccttctacatgacctatcttgcaagatgnctgactatttccacgttgccgaaggccctggaaatcgaatcatgggttacattatgggtaaagttgaggggcaaggagaatcttggcatggccatgtaactgcggtgaccgttgctccagagtatcgaaggcag

SEQ ID NO: 3184 - DNA, 94 bp, Glycine max
  Clone ID: 700557363H1
gtttcacattaatcagtaatgctgtatgtatacccaaaaatggtgtaacagtaacgtttaccttgcataaaatcagagtatttatgcgagtatt

SEQ ID NO: 3185 - DNA, 277 bp, Glycine max
  unsure (1)..(277): unsure at all n locations; Clone ID: 700557364H1
gtatttttcaagtaacttaaggtttcaaacctaggaagttggaagtcatggcagcaacattgatggcagcaacaagttctggcactcttaaagcaactcctttcctaggccaaggcaanggtgccaatgccaatgctcttagggtgttgtttccatgggaactgggaagtacaccatgggcaatgatttgtggtatggaccagacagagtgaaatacttgggacccttttcagctcagaccccttcatacttgaaaggagattcccaggggattatg

SEQ ID NO: 3186 - DNA, 294 bp, Glycine max
  Clone ID: 700557365H1
ttaaaacctacaaccttgatggcatcgatgtcagctacgaggacatcgccgccaacgaagccgactttgttaattccgttggggggcttgtgaggaacctgaagcagaacaagctcattactgtggcttccttcgcaacaagcgctgatgcgccaacaacaaattctacaatctcttgtacgcagaatatgctactttctttgacactgtggtgtttctgagctgggtagggtttactccttctcgcgccaacccagttgcgagcttggaggagaagatccttgccgtggccaa

SEQ ID NO: 3187 - DNA, 252 bp, Glycine max
  unsure (1)..(252): unsure at all n locations; Clone ID: 700557366H1
ctcatcgcctccgagaacttcacctccttcgcagtcatccgangccctcggcagcncccctccaccaacaaatactccganggcatgcncggtnncnnctactacngnngcnncganttcatcgaccagatcganaancttgcngntcacgcgccctccaggccttccanntcgacgcccaattcctggggatnaatgtgcagncntantcnggctcntnnggnaattcgcngcctacaccgccgtcctcaa

SEQ ID NO: 3188 - DNA, 92 bp, Glycine max
  unsure (1)..(92): unsure at all n locations; Clone ID: 700557367H1
aacactaaanaatttacattantnattanactaactcaancctcagtntatccaaattctccagccatggcagtttnttctgnatctgcttc

SEQ ID NO: 3189 - DNA, 120 bp, Glycine max
  unsure (1)..(120): unsure at all n locations; Clone ID: 700557369H1
agatggatcagtntttgtggagggtgtnnncctttgnttangatccttgtttcctttggagtgttctgactacttgnagnattcttacagagcacaccgtannncntctncatnaagtta

SEQ ID NO: 3190 - DNA, 201 bp, Glycine max
  Clone ID: 700557370H1
gtcaccggagaaggtcctgttgaacaacctagcaaaacatatcagtgacccttttggcaacaacttgctcactgtcattgccgggtctgctgagagagctccaactctctaaatcattcatcttcagtttttctccaatcttaatgtacaatacatatcactgagatattattaaggcattttgctttgttccttggaatc

SEQ ID NO: 3191 - DNA, 116 bp, Glycine max
  unsure (1)..(116): unsure at all n locations; Clone ID: 700557371H1
gggaaattcgatgcagggcttacagagaaccagatgatagagcacatgaaggacttggcctcaaagaacaaggttttcaagtcctacattggaatggggtantacaacactcatgt

SEQ ID NO: 3192 - DNA, 286 bp, Glycine max
  unsure (1)..(286): unsure at all n locations; Clone ID: 700557372H1
tacattgcaaaaatggcatcattcaccatgacagcttccatccttngctgcccagccgtgcaccaaccggtcggcagcgacgcagaggagatcagtggtagtgaatgcagccagcaaatctgttgaaggggaaaaggtcagttatgacacaatggtagcaatgcaaggaggaacttgatgttcgccacggcggcggctgctgtttgctcttttgctgcagggatggcattggcagatgagcctaaaccaggaacctcagaagccaagaaaaagtatgccccggttt

SEQ ID NO: 3193 - DNA, 283 bp, Glycine max
  unsure (1)..(283): unsure at all n locations; Clone ID: 700557374H1
ctgatccgcgagcnagggtttgtgaagatgacgacgattcgcaggttttgctgcaacgatcttcttcgctttgccgccgtgcaatctcgaccatctcaccgaaacattcaacatgtccttctacatgacctatcttgcaagatggcngactatttccacgttgccgaaggccctggaaatcgaatcatgggttacattatgggtaaagttgaggggcaaggagaatcttggcatggccatgtaactgcggtgaccgttgctccagagtatcgaaggcagcagt

SEQ ID NO: 3194 - DNA, 281 bp, Glycine max
  unsure (1)..(281): unsure at all n locations; Clone ID: 700557375H1
caataacaatggctgcctcactacaagctgcagctaccttcatgcaacccaccaaggttggcatagcctctcgcaacctcaaatctacacaatgcatttctaaggcttttngcttggaacctgctgcagctaaactcacttgctccttcancctgatctcaaagaatttgctcaaaaatgtgtcgacgctactaaaattgcaggattcgcccttgccacctntgctctcgttgtttctggagcaagtgcagaaggtgttccaaaaaggctaaccttcgacg

SEQ ID NO: 3195 - DNA, 283 bp, Glycine max
  unsure (1)..(283): unsure at all n locations; Clone ID: 700557377H1
gccttagccttcccnaccaactccaaacnacngagacatcnncatccatggctgcctccgtctccactgtcggagctgtcaacaganctcttttgaacctgaatggttctggagctggagcttcagctcccagttcagccttctttcggaccagcttgaagaaggttattgcctcaagggtcccnaacagcaaggtttccggtggaagcttcaagattgttgctgtagaagagaagaaagagattgaagagacccagcagaccgacaaggacagatggaaggg

SEQ ID NO: 3196 - DNA, 276 bp, Glycine max
  Clone ID: 700557379H1
gttcagaatctcaaatgtaggcttttcaacctcaattaacttcagaattcagggtcacaccctaaaattagttgaggttgaaggatcacacactgttcagaacctttacgattcacttgatgtccatgttggccaatcggttctgtgttagtaaccttaaaccagcctccaaaggactactatattgttgcctcaacaagatttacagagacacctctcactacaactgctgtactacactatgcaaactctttttcctctgcattgggacccgtg

SEQ ID NO: 3197 - DNA, 276 bp, Glycine max
  unsure (1)..(276): unsure at all n locations; Clone ID: 700557380H1
aaatttattgacgaattggaacaactggagggaaaaaatgaagcagagaattatcaaattcgttctagaaaagccaaacgtgtagtaattttgactaataaatctaaattttttaagaagtacgatacttataatcctacagagatactgataacgctgaaaaaaaaaaaaatgaattggctttaatacgttattcccaacaatcggnttttcggngagacataatcaaaggatctatangtgcncaaaggngtaaaacagttacttggaattttt

SEQ ID NO: 3198 - DNA, 290 bp, Glycine max
  unsure (1)..(290): unsure at all n locations; Clone ID: 700557381H1
gcggcgagaagtgtacgaggaggggcgaatcttcgacatcacccacaggtatgtccccgagatgccggtgtgggactcgacggaggggctcgggcagcacttcctgtggctcgaaaagagcatgaagaatggctcgcgcgctaacaactcaacatgaagctcggtgttcacaccggcacccatgtcgacgcgcccggtcacttttacgacaattantacgacgccggcttcgatgttgactcatcgacctaacactcctcaatggccttgcacttttggttgatgttcca

SEQ ID NO: 3199 - DNA, 287 bp, Glycine max
  unsure (1)..(287): unsure at all n locations; Clone ID: 700557382H1
gatagatcatggcattatcaggatccaactgggaagatncaaggacctttttgctatgttgcagctatacangtggaatgnaagtggatgtttccctccaganntccgaatatgganggtaggtgagnaacaagataantctatactccaaccgatgcactaagtgggaagtgttccaaaaatgtgtcattgccattcaacagccaattgctctcttaggggtcagtgttacattggataatanagataatagtcaggatgctgggaagactggnaagttgnaattt

SEQ ID NO: 3200 - DNA, 283 bp, Glycine max
  unsure (1)..(283): unsure at all n locations; Clone ID: 700557383H1
anagtganagantaagacacccncnaagtgtaacttgagtgattatatctgatgagtgcagaaagaagggaggattgttggtgatcgatcatcgatcatcgatcatcgatcatngatggcgtctgctagccntggaagtngtgnggtggcagttccaggtctgttaatggtgcangtcaggggttcttccagttccgtcgattggctggcaganagacgctgagatgtctttgagagaccacgaggacgntaganatagtgagnctgaccncattgatggttt

SEQ ID NO: 3201 - DNA, 280 bp, Glycine max
  unsure (1)..(280): unsure at all n locations; Clone ID: 700557384H1
caacctcttccataaacgggtggtgcctctcttccanctccccagccaaaacctctctcaggaaggccacattacgcccttccgtcttcgcaacccttaacactccttcttctccttcctcttcatcttccttcccctctctcatnaagacaggcctgtttttgctgcccctgcccccatcatcaccccaactgtgagagaggatatggcaaaggaatacgagaaagctattgaagaattcagaattgttgagggagaagagtgaatcaaagcgacantg

SEQ ID NO: 3202 - DNA, 280 bp, Glycine max
  unsure (1)..(280): unsure at all n locations; Clone ID: 700557385H1
cgaganatggcgatggcaatggcgcttcgcaggctttcatcttcaattgacaagcctctgcgccctgctgcttcaatgccggttccctctactacaagtcgtctttgcctgatgaagctgtttacgacaaggagcgacccggagtncatggccgaagcagttgaatgctccacttgaggtcgtggatcctgagattgctgatattattgagcttgagaaagctaggcaatggaaggggctagaatgataccgtcagacaatttcacctctgtgtctgtga

SEQ ID NO: 3203 - DNA, 281 bp, Glycine max
  Clone ID: 700557386H1
agaatctctaagagtggcatccaaatcaacactaaaggtttcaaagacaaagaatacttcactcgtgaccagatgtgaaattggtgacagtctggaagaattcctcacaaaagcaacaccagataaggggttgatcaggttgttgtgtccatgggagaagcattaagaacaatttccttcaaagtgaagacggcttcttgtggtggaacacaatgtgttaatacttttggggacgagcagcttgcagtggatttgctagctaatcagcttctttttgaggc

SEQ ID NO: 3204 - DNA, 283 bp, Glycine max
  unsure (1)..(283): unsure at all n locations; Clone ID: 700557388H1
cacatagccctcttctaatcccttctcacaaactcaaaaaacccttacactcatttcccttaatggattcgagtacaacaacctccancgacagtgaagtagcctatgacatcccacccatcctcaaagtctacaaaaacggtcgctagagaggctagaaggcgtcgaggttgctcctccgggtcncgatcctgaaaccaacgtggaatcgaaagacatcgtaatctccgaaaaagacggcttatccgccaggctttacattcccaaaaccattacgcgccgc

SEQ ID NO: 3205 - DNA, 243 bp, Glycine max
  unsure (1)..(243): unsure at all n locations; Clone ID: 700557389H1
cattttccctctgcccttttctcgatggacacggacggtgtcgtttcgttcaaccatgtctcgccggaggattcccacgaggttcatgtcttggccgtcgacgacagctcgttgatcgaaaggtcattgagcgcttgctcaaaatctcagcttgtaaantacggctgtggatagtggaatcagagcactgcaatttctggggctggatgagcagagaaggacctctgaatctgatggttttgt

SEQ ID NO: 3206 - DNA, 265 bp, Glycine max
  unsure (1)..(265): unsure at all n locations; Clone ID: 700557390H1
ttctttgggtgaaaggactcgatcaaccacacctcccagctgcaataaaaatgatgataagtgataagaaagagactactgatattccacactctggcaaatanangaaccatacgacggatccatccactgtccggaagccgctatgagaaaagctcgtgtctcagttcgtgcccgatcagaagcacccatgatcagtgatgggtgccaatggcgaaaatatggacaaaagatggctaagggaaacccttgtcctcgagcatac

SEQ ID NO: 3207 - DNA, 278 bp, Glycine max
  unsure (1)..(278): unsure at all n locations; Clone ID: 700557391H1
ggcacacttcttccctacaggcagcgtcagtacagaattaagccaaaataattaattaattcttggcaaaatcacatggccgccgccgcagatgggctcttccggccgatctacgagggctgcatctccgcctacgacaacgngtcgagcgccgcccctancacaagaactgcggctgcgctctgcacagcaagtcgaggaggaacagcagagcgtgcacgcacaagttgccgaaatgcaacaacgtgtcctaccccatgaggagggcttggagtgaa

SEQ ID NO: 3208 - DNA, 277 bp, Glycine max
  unsure (1)..(277): unsure at all n locations; Clone ID: 700557392H1
ctgcggttcccttctttgttgttgctgcggtctggtttgtgattantgggctcagtttatcattcatatgcttgtnttactgctgttgtccaaganagccttatggctattcacgtttggcctatgctttgtccttgatctnctcgttctcttnacccttgcagcaatagttggatgtgttcttctttacactgctcaggggaagtttcatgggagcaccacaaacacgctgaaatccttggtgagtcaggctgacttcaccgccgaaaacctcagg

SEQ ID NO: 3209 - DNA, 273 bp, Glycine max
  unsure (1)..(273): unsure at all n locations; Clone ID: 700557394H1
tttaaggaggcattggttagtttcaagagggcttgtnagttgcagcctgtggatgtgaggcctcattttagaacagggaactgtttgtatgttcttggcaggtacaaggangccaaggaggagttcctcttggctcttgatctgctgaggctggagggaaccaatgggcttacttgctaccccagatttatgtcaacctcggcatcgcactcgagggtgaagggctggttttgagtgcctgtgagtatatagggaggctgcgattctttgtcc

SEQ ID NO: 3210 - DNA, 275 bp, Glycine max
  Clone ID: 700557395H1
gcaagtcgcgcttccgccatactgactctgcctgctactgagttgtgacttgggcgaagacatgctgagaactctagttgtgaagcgcagccttggtcaccactggcactcgcattctcagcacctccgactccagcggcattctcatcatccccggagcccaactcctccgtggatgcagaaacccgcaagtacgcgggctatgctgccctcctcctcttctgcggcggcgccacctactacacattcaccctcccggacgacgccaagcacaa

SEQ ID NO: 3211 - DNA, 270 bp, Glycine max
  unsure (1)..(270): unsure at all n locations; Clone ID: 700557396H1
gaagaaattggtgttctttaatgtgaaagggttggaacggtttttgattttaaccctncaaagagccttcctttgcggtttnncttcttgagaagaagaaggctctttgttgttgttgattttgaagaaggaaagaaggaggaagaaaatgatgaggctatggatttctatctgcaattggtggaactttttgtgagttcatggttcatatgctttatgggttttacanattagctccgctgtggctggggatctctcacaggctctcaa

SEQ ID NO: 3212 - DNA, 292 bp, Glycine max
  unsure (1)..(292): unsure at all n locations; Clone ID: 700557407H1
aaggtgaaagatattgaacttcaagtgacagaaagattcaggnacagagtggtggaggaaggttataaccctagttatggancnagacctctaagaagagccataatgcgacttttggaggacagcatggctgagaagatgcttgccagagagatcaaggagggcgactctgttatagtggatgttgatnnnnnnggtaatgtgattgtgctcaatggtagcagcggagcccccgaatccttgccagagacgcttcctgtataatgcggttaatttgctaatactatgtact

SEQ ID NO: 3213 - DNA, 291 bp, Glycine max
  unsure (1)..(291): unsure at all n locations; Clone ID: 700557408H1
aaggtgaaagatattgaacttcaantgacagaaagattcagggacagagtggtggaggaaggttataaccctagttatggagctagacctctaagaagagccataatgcgacttttggaggacagcatggctgagaagatgcttgccagagagatcaaggagggcgactctgttatagtggatgttgattcnnntngtaatgtgattgtgctcaatggtagcagcggacccccgaatccttgccagagacgcttcctgtataatgcggttaatttgctaatactatgtact

SEQ ID NO: 3214 - DNA, 295 bp, Glycine max
  unsure (1)..(295): unsure at all n locations; Clone ID: 700557409H1
aaatccatggcgaaatcatcaaaacgcngcgtcggaaccagcagcaccgactcnnnnnnnnnnnnnnnnnnnnnnnnnnnnnnnnnnnnnnnnnnnnnnnnnnnnnnnnnnnnnnnnnnnnnnnnnnnnnnnnnnnntggcactgcctccaatcccttcgagtcgatttggtcgcggaggaaattcgaggtgctagggcagaagcngaagggcgaggcacggcgcatggggctggcgcgctccctggcgatccagaagcgcaacganacgctcctcaaggagtaccaccagagcg

SEQ ID NO: 3215 - DNA, 293 bp, Glycine max
  Clone ID: 700557410H1
cacagaccccatctgtttcccgtaaccactccatagccagtacaccttatgttcagccatctcttaggtcctcctaccatcaatccccctccctaagcatcagccgaagctccgtagatcttaggaatgcatcccaaagatctctagcttctcacttgaattcaccatgttccatgggatacccatctttgtcatctcttaactcaaggtacatgtctccacacattccaagtccaagcaagcttcagtaagctatatgggttcatccagtcatcaacaacatcctctccgtt

SEQ ID NO: 3216 - DNA, 294 bp, Glycine max
  unsure (1)..(294): unsure at all n locations; Clone ID: 700557411H1
ctcccatctcacacacccctcgcatccaacaatgtctctcaccattccctccaacctctccaagcccgccgccctccgccccaaactaagcccaaagctaaggtccgccgccacaaccaccatcgtctgnnnnnnnnnnnnnnnnnnnnnnnnnnnnnnngtgtcctccgacctgaaggcgttctccgccgcgctggccctctcctccatcctcctctccgcccctctccccgccggcgccgacatctcggggctcaccccatgcaaggagtcgaagcagttcgcgaagtgaga

SEQ ID NO: 3217 - DNA, 295 bp, Glycine max
  unsure (1)..(295): unsure at all n locations; Clone ID: 700557413H1
atccgttccaaaccacataagcttcaacaaagatggatgtagaaaagttgaagaagatggccagttctgttcgaactggtgggaagggtactatgagaaggaagaagaaagctgtccacaagactactactacagatgacaaaaggcttcaaagcaccctgaagaggataggngtgaatgctatccctgcaattgaagaagtcaacatctttaaggatgaaatagttatccagtttttaaaccccaaagtacaagcatctattgctgccaacnttgggttgttagtggttcacca

SEQ ID NO: 3218 - DNA, 294 bp, Glycine max
  unsure (1)..(294): unsure at all n locations; Clone ID: 700557414H1
ttttaaacaaaggaatgatctcctagcagtttaaaatttaagatatccccaaatgtcagtaaagaccactaatgagaccattacaaaggcagaaagtacaaaaacagaagagcacttggtgcgatttgaggaagcctttgaaatgtgaggcacccttctgagcaagaaaaggtctttcaaccccaaggtggagcctgcttttgtaacttgttgagaaatcttaaattttaaactgctaggagatcattcctttgttttttttttttngcctccatctctttttngggccaattg

SEQ ID NO: 3219 - DNA, 287 bp, Glycine max
  unsure (1)..(287): unsure at all n locations; Clone ID: 700557415H1
tctttcttatttcccgtaatttgtgtccttctctctaatcccccttcaacattttcgcttcttctctttctcaaatccctatcttcaaaatttcaagattatcactttaaagacagannnnnnnnnnnnnnnnnnnnnntgactctggctatggctgtttggagtgctggtcttcacttcagtgctgctntcagtagcttgagacctttggagaaaaccatttgcactgccccttcttgaaggcgtcatctgggttgctgctataagccattctgcatcctaacana

SEQ ID NO: 3220 - DNA, 122 bp, Glycine max
  unsure (1)..(122): unsure at all n locations; Clone ID: 700557416H1
actnctcttcttacttcactgcacgtttttncntcactctttctctctcttacatgccggaatttcctctctctttctctctccggagaatagaataaaaaccctaaaccttcgctttgctg

SEQ ID NO: 3221 - DNA, 253 bp, Glycine max
  unsure (1)..(253): unsure at all n locations; Clone ID: 700557417H1
cgggaatccttcaaancgtgatatcttccatgctgncccccaatgttgatcattctcaggactttgtaaggnnagatatcaaggagtggttgaactggctgcgcaatgatataggttttgatggatggcgtcttgactttgttagaggtttctctggtacatatgtaaaagantatattgaagcatcaactcctgtatttgccattggagatattgggacagttgggctatgaacatggagttgtgttacaac

SEQ ID NO: 3222 - DNA, 223 bp, Glycine max
  unsure (1)..(223): unsure at all n locations; Clone ID: 700557418H1
cttatgggaagttatgaaaataggattggggcataagaaaaaaatggtgggtggtgaacaaagttgtggaacatgtccttcatgtttctgattgtaatatatattgccacaacataatgtgaattgttggtttcttcttgtacatcaatatctatagtagtccaaaanaaaggngcngcataccgcgcggatatcgacgntcggnactccaggncttaacgga

SEQ ID NO: 3223 - DNA, 298 bp, Glycine max
  unsure (1)..(298): unsure at all n locations; Clone ID: 700557419H1
gtttcactacctcctctgtttntcttcanttcncagtgagttggaattgataatctagagagtgactactgatcgccgacagcnancttttnncgtgtaatgnngacctccntngcagtngccggcgctttgacggngcacgatcgccgggttctgacggcggtgaacgccggagcctcgagcctgtcgttagccggttccagcttcattgtagtgtgcnacctcctcttcaaggagctccgcaagttctccttcaagctcgtcttctacctcgctctctctgatatactttgcagtc

SEQ ID NO: 3224 - DNA, 298 bp, Glycine max
  unsure (1)..(298): unsure at all n locations; Clone ID: 700557420H1
caaccagtaacctttcaatttctctctcttctgctctcactctctcacttgggggttgaagatgagaatttgtggagcagcaatcagcagcagctacaccaccacgncccaattcgcttttagtgtttgcttcctcttccctctccagtcctgccaaaaccaagttcctgccctcactttctagattttctgtcaagcgtctctgcttcctttcccaaactcgtccgcacatttccgtgaacaagccctccatgaacctgttgaacagactcgggtttggcagcgcaagagcaccaga

SEQ ID NO: 3225 - DNA, 293 bp, Glycine max
  Clone ID: 700557421H1
aatatagcccaagccctatacaaccaaaccctaacacacacccatttgattcagtttccatggctagcctcaaggttgcatttttggctgcagtgctctgcatggttgtggtgagtgcacccatggcacatgcagctatcacgtgcgggcaggtgacgaatagcctgatcaattgcatcggttacctccagaacggaggaacgccgccgtcgggatgctgcaacggagtgaagagcctcaatgccgccgccaagaccaccgccgaccgccagacggcgtgcaatgcctcaagt

SEQ ID NO: 3226 - DNA, 291 bp, Glycine max
  unsure (1)..(291): unsure at all n locations; Clone ID: 700557422H1
aatgaactccatagccttcaaatccttcgtcngcctccgccagtcctcgccggaggccccacatttcgctgcccagtcccgccccgccactccccaccgcaaattccgcgtcgtggccggaaaattcagccccaggctgaacggccggaacctccgcgtggcggtggnnggcggcggtcccgccggaggagccgccgcggagacgctggcgaagggcggcgtggagacgttcctgatcgagcgaaaaatggacaatgcaagccgtgcggcggcgccatcccgctgtgcatg

SEQ ID NO: 3227 - DNA, 291 bp, Glycine max
  Clone ID: 700557423H1
ggactttcaaatgtgaagaaacccccaaaatgatcaatgacaacaatgacagcactaaggatttatcgtaacatgaatggtgttctgtgaaatgacacaacagagtgctcgccatcttggaaatatgtctgcttgttcttgtttgatttgtttatttttactcgaggaaacaaatcatataggaagagggttttgggttggggggagcgccaggggacatgctcgagatcccttgtggctcactattggaacataagcttaaattaaattgaagttttaaattaatggttt

SEQ ID NO: 3228 - DNA, 292 bp, Glycine max
  unsure (1)..(292): unsure at all n locations; Clone ID: 700557424H1
gaaaaatcagcnttcttcaagcaccctagatttcctctctctctctctaaaatggcgttctcttcttttctcggccgagtcctcttcgcctctgttttcatcctctccgcttaccaagagttcgttcatattccttaactgttccttttctctgcaattttgaatcatgcatggctattgtgttttgtgctagcagtaatttattgtttttaactgagtttatctgctgagttggctgttgttgttggtagtttctcactttctctgcttggatttgttacgctcaattgac

SEQ ID NO: 3229 - DNA, 292 bp, Glycine max
  Clone ID: 700557425H1
caattaacacacacaaacagaggctacgtacgatcaaattaattaagatggcggaagtgaggaacaaacaagtggttctgagggactatgtgagtggttttcctaaggaatccgacatgaacatagttgaaggaaccacaatattgaagcttccacaaggttccaatgatgtgcttctaaaaaatctctacctttcctgtgacccttacatgagaatgctcatgaccaaggtggaaggcctcgacgtgtttggcacctatacacctggctctccattaacagggtatggagt

SEQ ID NO: 3230 - DNA, 290 bp, Glycine max
  Clone ID: 700557426H1
aagcaatggctatgagatcgtgggtgagtcgaggaggatccatgactcgtttgatggactcaacaaatcgaggggctttgagtcggttcttgagcgacaagggtcgcattctcagcgaggaggaacaggccaaagagaatgtctacatccagaaatgggagagggagaggttggagaaacagaagcaactgtctgagaaggccaaggctctcacggacaaagatgcttctgctgctgctcataagaaacctgaaggtgctcaaaaggatgagtttatctttcacacaacc

SEQ ID NO: 3231 - DNA, 292 bp, Glycine max
  unsure (1)..(292): unsure at all n locations; Clone ID: 700557427H1
gttcctaccatagtgctaggaaagtgagtgagaganagagatcacatagcagaatggcttctactcaatgtttcttgcaccaccatgctcttaccacccctgccagatccccatcacaacgcatcatggttagcaccaagcctaaccagcttgtttgcaaggcacagaagcaagaggatattgatgtcagcccaatctctcgccggttagctctaaccgtgctcattggtgctgctgctgttggctccaaagtccaacctgctgatgcagttatggggaagctgccaatgtg

SEQ ID NO: 3232 - DNA, 291 bp, Glycine max
  unsure (1)..(291): unsure at all n locations; Clone ID: 700557429H1
tctttccctaattgacaagatccttcctggtctacagggaggtngttgctgaattgaaggcagctggtgctatttggatctagtntgatgaacctaccnttgtgaaggatctcaacacccaccagttacaagcatttacacatgcctatgcaganctagagtcaagtttatctggttttaatgttctgattgagacatactttgctgatgtccctgctgaagcatacaaaacactcacctctttgaaggctgttactgcatatgggtttgatattgttcgtggaacaaaga

SEQ ID NO: 3233 - DNA, 289 bp, Glycine max
  unsure (1)..(289): unsure at all n locations; Clone ID: 700557430H1
atgtatggaggttctgactggctcgactnagagaaaagtggacagcattctgggagagacacatctgtttgcatggaacttgcattgtctgggatgaaatttcagtatgatgtatttccagttggtggactacgtgtatctaagatgtcggtgtctgttcaagatctttttctgtatgacagaagccnagatgcaccttggaaactggtattaggatattatcattcaaaaggccatcctagggaatcttattcgagagcattaaatggacttggaggcagtgagacca

SEQ ID NO: 3234 - DNA, 290 bp, Glycine max
  unsure (1)..(290): unsure at all n locations; Clone ID: 700557431H1
ctgangtgatggctttgaatttgccttctcccgcccaagtgaagcccttatttttctcttcaaataactccacaaaactnccaggtagcttttctttgaagagaaaagatagtgacacaacagtagagagacgagtttattgctctgccgctgctcaatcaccntgnaccagcatggccaggaacagctattcccgagccttctgatttcaagacatgggatgggcaaaaacctatttctgtcttaggatctacgggttcaattggactcagacactgagtatagtggct

SEQ ID NO: 3235 - DNA, 259 bp, Glycine max
  unsure (1)..(259): unsure at all n locations; Clone ID: 700557433H1
agatatttgcttttcaggttgctaactgtcttgaatttgagtgaggttcaacttgttatcaatagccaaaatatattggcagatatcatgtgtttcactgcctaaacttgatttctaagaacaatgctaaaagtccttttgtttgctttccctntctgtcttcattaaattagtttatccctgatttcctgttattgcttagatatttgtatatcatatacaatgttatgtaattcaggtatgccacaaaattttattt

SEQ ID NO: 3236 - DNA, 302 bp, Glycine max
  unsure (1)..(302): unsure at all n locations; Clone ID: 700557434H1
ccatttccataatcactttntcctactntcttctccatccatcccttgactaattaattatccctcacaactancaatgtcncgaagagaaacaccacaagcaccgcctcttccaccaccacaaggacngggataataagccagtagaaaccgatactggttacgacaacacatcatattccaagccttctgatgactatgactctggnttcaanaagcnatcgtatgagtcttctggcggtggctatgaaggtggttacaacaanacatcttattctagtgatgagcnagcttctggtggt

SEQ ID NO: 3237 - DNA, 297 bp, Glycine max
  unsure (1)..(297): unsure at all n locations; Clone ID: 700557436H1
ggctttcagcgcgtatacatctaagatttgtagttgcattagcaataccataatgcaactacaaacctcatattttaggctttcagcgcgtatacatctaagatttntagttgcattatggtattgctaatgcagatttcacaactgaatccctcattcccactggctctgtaaaaggaattgataatttgacataatgaatgaactttgtgattattgagttaaaaaanaannnnaaaaaaaanaaaaanggggngccccccnnnngtnggccnctccccccngggattttttncg

SEQ ID NO: 3238 - DNA, 289 bp, Glycine max
  unsure (1)..(289): unsure at all n locations; Clone ID: 700557437H1
gggaggctgtattagagggacacattgacctattaagtactgatcattcacnanctgtgcctgaactcatccttatggaggagggtgactcttaaaagcttggnggggcatatnanctntgcagtnnaatcttccagtgacgtggncatatgggaagnnatatggacntactctggaacaattgtcnnnntgtggagcaagnancctgcaacactggcggggttagaatcanaggggnccattgcagttggnaaccatgcagatattgtagtttggcaaccagagctgg

SEQ ID NO: 3239 - DNA, 289 bp, Glycine max
  Clone ID: 700557439H1
atttaatggataaagcttatgagcggtttgtgatcagaaaggaaggaagtgcaaaacagaggaagcgaattaaaaaatcttatgatgcaaaggaccaacttttggagggtggtgaggatgatgatattgttcaatccaagtatgattcagatgaagatcagggtgatcaagaagcaaatccattaatggtgccacttaatgatggggcagagctcacccaagaggaggtcatgaataagtggtttagtcaggatgtctttgctgaagctgcagaggaaggagactttga

SEQ ID NO: 3240 - DNA, 246 bp, Glycine max
  unsure (1)..(246): unsure at all n locations; Clone ID: 700557440H1
aaacacaacacaacacagcataccgtgtttcattttctctcacacacaaacctccttcgttttcatttacttctcaggaggtataactactatttttcgcnnnnnnnnnnnnnnnnnnnttgattaaatcttttgccatgggaacccagattttgcgacctcaggactgcttggtagaacgaatcagggctcctccggctgacttttcccggcggaggagttccggtaattactgtaattattatt

SEQ ID NO: 3241 - DNA, 293 bp, Glycine max
  unsure (1)..(293): unsure at all n locations; Clone ID: 700557441H1
agaacaagtagttgagaactaagaaggagaagcaaatggcttcctcaatgatctcttccccagctgttaccactgtncaaccgtgccggtgccggcatggttgctccattcactggcctcaagtccatggctggcttccccaccaggaagaccaacaatgacattacctccattgctagcaacggtggaagagtgcaatgcatgcaggtgtggccaccagttggcaagaagaagtntgagactctttcctacctgccagaccttgatgatgcacaattggcaaaggaagtaga

SEQ ID NO: 3242 - DNA, 290 bp, Glycine max
  unsure (1)..(290): unsure at all n locations; Clone ID: 700557442H1
ctggcgccatgngcccgaaccgcccatacgtcgtcgtttgggtcgacccaagcaacaagctctcgacgcgcgtggacgaaagcggcgacactgacgcgaattgggaccaaacgctcacaattccgttgccaccaaagcctctcgaggatcaaacgttgtacatcgacgtggtccacgccggctcggaggaggacaccaagccgcttatcggctcggctcggctcaagctggtggacattctcgacgacgttggaatcggcgagcgcgtgagccgcacgctctcgctgaag

SEQ ID NO: 3243 - DNA, 293 bp, Glycine max
  unsure (1)..(293): unsure at all n locations; Clone ID: 700557444H1
ggcatcttcattcccatgcatcaaaatcncagcttgttcctcctctccatcatgcacatcttcatcaacttcatcatttagattttcttcttccaagccttatgctgctgtttctataaggaactctcagactgaagggcctctgagaagaccagtggctcctcctgtgagagaaccatcaagtattgtccctcagccactgaagnnttcacctccttctcaggttccgccccagaaggcttctnntnnttgctggggatgataataatgtcattacattagagtnnngggng

SEQ ID NO: 3244 - DNA, 291 bp, Glycine max
  unsure (1)..(291): unsure at all n locations; Clone ID: 700557445H1
aaaattgataacatcacacagcattagtatgtatcagcaacaagggtcagatccaacaaatcaatcaccggcaaccggttttccggtgagctatagcaattcaacaacgtattcgaccaacgaggcttcctacgctccagtcccacctccccagcncanacctnanaaantcgggttccatggcctctgtgactgcttctccgaatgtggaaatgttgcatgacgtgttggtgnccatgtgttacctttggccgagttgcagaaattgttgacaagggatccanatcatgt

SEQ ID NO: 3245 - DNA, 293 bp, Glycine max
  unsure (1)..(293): unsure at all n locations; Clone ID: 700557446H1
tttaaacaaaggaatgatctcctagcagtttaaaatttaagatatccccaaatgtcagtaaagaccactaatgagaccattacaaaggcagaaagtacaaaaacagaagagcacttggtgcgatttgaggaagcctttgaaatgtgaggcacccttctgagcaagaaaaggtctttcaaccccaaggtggagcctgctttngtaacttgttgagaaatcttaaattttaaactgctaggagatcattcctntgtntntnttttntngccnccatcnctttttngggccatngg

SEQ ID NO: 3246 - DNA, 299 bp, Glycine max
  unsure (1)..(299): unsure at all n locations; Clone ID: 700557449H1
aaaagccttagccttccctacaactccanacagggagacatcatcatccatggctacctccgtctccactgtcggancngtcaacagagctcttttgaacctgaatggttctggagctggagcttcagctcccagttcagccttctttgggaccagcttgaagaaggttattgcctcaagggtccccaacagcaaggtttccggtggaagcttcaagattgttgctgtagaagagaagaaagagattgaagagacccagcagaccgacaaggacagatggaagggcttgcctatgatat

SEQ ID NO: 3247 - DNA, 180 bp, Glycine max
  unsure (1)..(180): unsure at all n locations; Clone ID: 700557450H1
cttatgggaagttatgaaaataggattggggcataagaaaaaaatcgtgggtggtgaacaaagttgtggaacatgtcnttcatgtttctgattgtaatatatattgccacaacattaatgtgaattgttggtttttcttcttgtacattcaaattatcttattttaagttatgaattctc

SEQ ID NO: 3248 - DNA, 287 bp, Glycine max
  Clone ID: 700557455H1
cgtttgatgaccgccgcaactgccttccggctaggccggcccagcgctccgccgggcaatgtaagtcgtttttgtcgcaccctgtcgattgtaattcgtttaggtgtaagccttttgttccttcattgccccctcctcctccatatcactactaggttatttctgaagaatataagccaataaaaaacgttgttgatagcaggaagatgcacttcgcaattgcacaaggaaaacaacggaagccaagtttccgcgcattttgtcacataagaaaaacgaatgtcaat

SEQ ID NO: 3249 - DNA, 287 bp, Glycine max
  unsure (1)..(287): unsure at all n locations; Clone ID: 700557457H1
gagcattagactgcgcagggtgcagnaaagagggaagaggagagtgacaccnngaaatgacgagcatntcgtatactaancancactctgctgccactgcanatcnnnnngtttcggccttctctatacactctntcntgctctctggcctcanatgtggacnccantcncanttcctacttccccaagngnggcnanaccctcgaaatggtgtgngagtcnctnnccttnaaagggangggnctctgnnggtcaaccanancggcttcgttgtcctatgcgacgag

SEQ ID NO: 3250 - DNA, 285 bp, Glycine max
  Clone ID: 700557458H1
aatatcaacgtcaagctgtaacaggttgtcctccgagtcttcttccccttttgtttaattagcatatgaaagaattcttaggctaaacctttgggagcagtagtaacaagaggattagatatcatgttatttgtacatatcacctttattagtatgcaattgtttgtgtacatctttattttgttcccagtttcatctgttttcttttatcatttcacgcttttcgttctgttgcgtatttaaattttaaacaagcgatgtaataaatggggtgttctatgtttt

SEQ ID NO: 3251 - DNA, 289 bp, Glycine max
  unsure (1)..(289): unsure at all n locations; Clone ID: 700557459H1
atcaangcagctgcggatcatgctggacatncancacaacagnngntcnagnancancctatngcannagcatatgggnanagcatctctcnttcngaggcagcatctngtggattgnnctggccgtttcaacaactttggctgtaatggtgggttgccatcacaagcctttgagtacatcaaatacantggaggacttgagacagaggaagcatacccctacactggaaaagatggtgtatgcaaattctcagctgaaaatgttgccgttcaagtcattgactcggtc

SEQ ID NO: 3252 - DNA, 286 bp, Glycine max
  Clone ID: 700557462H1
aaatatcaacgtcaagctgtaacaggttgtcctccgagtcttcttccccttttgtttaattagcatatgaaagaattcttaggctaaacctttgggagcagtagtaacaagaggattagatatcatgttatttgtacatatcacctttattagtatgcaattgtttgtgtacatctttattttgttcccagtttcatctgttttcttttatcatttcacgcttttcgttctgttgcgtatttaaattttaaacaagcgatgtataaatggggtgttctatgttttc

SEQ ID NO: 3253 - DNA, 285 bp, Glycine max
  unsure (1)..(285): unsure at all n locations; Clone ID: 700557464H1
aggcattacataacacatcttcattgnctcgatggtgagcctgaccagaactggaatcatttgcatactgatcaacnatatgtgcaccttggtaggactaacacttcagagaatagttcatttatntatcntgctgaaaatatgtccatagatagcatatctttcccctctcattggaattcttcctcaaggtcaaatggatatgcatcctctagtcacaacattgttgtacctcctcaccagtcagatgcatcaggcacttctaatgatcatttngtgcattcg

SEQ ID NO: 3254 - DNA, 300 bp, Glycine max
  unsure (1)..(300): unsure at all n locations; Clone ID: 700557465H1
atccactcnangtgggccatgctcggagccttgggctgcgtcttcccggagttgcangtcccgcaacggggtgaagtnccggagaagccgtgtggttcaaggccgggtcccagatcttcagcgagggtgggctcgactacttgggcaacccaagcctgatccacgcccagagcatcctcgccatctgggccacacaagttatcctaatgggtgccgttgaaggttaccgtattgctggtggccccctcggtgaggtcactgacccaatctacccaggtggcagcttcgacccattgggcc

SEQ ID NO: 3255 - DNA, 281 bp, Glycine max
  unsure (1)..(281): unsure at all n locations; Clone ID: 700557469H1
aagcggcaccctctgcgctnncgcaaagttttatccaatttctctatagattcgttcantccctttagtatnaccctgtgcttctctccaacctctcatcatcnatctatttgctccaaacatggatgctanatctcggatctcgcccacacgtctgacanataagaagtgtgtgccatgcaatctgaaggaattgcgaccaatgagtgaggatgcagcacacantctaatgccacaggttgctgagtggaatttggtaaacgaanatggtgtcatgaagc

SEQ ID NO: 3256 - DNA, 285 bp, Glycine max
  Clone ID: 700557473H1
tgaagctgaacgtggatggttcacgcgacccatacaaaagttcctccgctggttgtggtggtgttctgagggacgcatcagcaaagtggctccgtggctttgctaaaaaactgaaccctacttatgcagtgcaccagacagagttagaagccattctcacgggcttgaaggtggcttcagagatgaatgttaagaaactaattgtggagtcagacagtgactctgtggtgagcaggtggagaatggggttaagcccaatcaccctgactatggtgtcgtggaact

SEQ ID NO: 3257 - DNA, 277 bp, Glycine max
  unsure (1)..(277): unsure at all n locations; Clone ID: 700557474H1
gcgatgctggcgtcgaggccctacggcggctgaaagcgaccgaaccaccgttgttnctcgctcccaacccggcgctgtcggaagctgctcgtactgcgtcgcaatacttgttctcttccctgaatccattttccccaaaatcgccactggaccaactcctcgtggacggtttcgacgccgaacagatatggcaacaaatcgacctccaaacgcagcctctattatccacccttcgccgccgcgtgaagcagctggtcgaaaatcccgaagagatttc

SEQ ID NO: 3258 - DNA, 285 bp, Glycine max
  unsure (1)..(285): unsure at all n locations; Clone ID: 700557475H1
ctcactttcatttctacatccctggctcngttccgtcgatgacgatggcntttagggtgcgaaaccctgacctccgctttctcattcttctctctctcttgtccatcacttccnccaaggtcttcttcgaggagcgtttcgatgacggatggggaaatcgttgggttaaatcagattggaaaaaagatgagttctggctggggagtggaaccacacctctggccaatggaatggagacgctaacgacaaaggtattcaaaccagtgaggattacagattctacgc

SEQ ID NO: 3259 - DNA, 278 bp, Glycine max
  unsure (1)..(278): unsure at all n locations; Clone ID: 700557476H1
atctttanatgatgtgattcaataccgaaatcctaaggataatgttgtcattaaggatggtaggatcaccanagatggtattatttgtacatgttgtgataaggtgctcacattatcagagttcaagtttcatgctgggtttacagtgaatcgcccctgcttgaatattttcatggagtctggtgagccctttacactctgcctccttcaagcttggtcagctgaatacaaagccaggagnagccaaaatcaagccgtacatgctgatgataatgata

SEQ ID NO: 3260 - DNA, 289 bp, Glycine max
  unsure (1)..(289): unsure at all n locations; Clone ID: 700557478H1
aacgacgcttcgctntcttttttcagctcnngcggtttctcnttttctatcagcaattgtccagtggtgagaancaaataacaattctgagtgcanttggttgaaacgggagtttgtggatntgttaaaagattgtgtggtagagtgaagcttggagatttaaaaaagagaagaaatactatcaggggcttganngcncaatctgtcctgttatgtggagttcacgagcatttgagantatttgaagnaccagttggggtcagacnctggacagctacatagatncnag

SEQ ID NO: 3261 - DNA, 152 bp, Glycine max
  unsure (1)..(152): unsure at all n locations; Clone ID: 700557479H1
cgcaactacaccatcgccatgcttacaccttgccttntttcgtttcactaatacataaatancactaatatattgatattaatacatcgtagaccaaatcagaacaatcaaacagcctttttctgtgtctcttccacacaacatacgnctcc

SEQ ID NO: 3262 - DNA, 200 bp, Glycine max
  Clone ID: 700557480H1
aaacaaatcaaagccatggccacctccaacttctctattgttctctccgtctccctagccttctttttggtgctacttaccaaggcacactcgaccgataccgtttctttcaccttcaacaagttcaacccagtccaaccaaacattatgctccaaaaagatgctagtatttcatcctctggggtgttacaactcaccaa

SEQ ID NO: 3263 - DNA, 296 bp, Glycine max
  unsure (1)..(296): unsure at all n locations; Clone ID: 700557481H1
gctaagagagaatatggagagtagtgaggnaattaggtgtaaggtatgcgtgaccggcggtgctagttacataggctcttgccttgtcaagaagcttctgcaaaagggctacaccgtccactccaccctcagaaactttaaggacgagtcaaagataggccttctgagagggttgcctcatgctaatgatgagagactggtgttatttgaagcagacatatataaaccagacgagtacgagccagcaattcaaggctgtgagattgtctttcacgttgctactccctatgaacatc

SEQ ID NO: 3264 - DNA, 296 bp, Glycine max
  unsure (1)..(296): unsure at all n locations; Clone ID: 700557482H1
atcaacttgtatcttaagaactgaaatcgcacattcaccctgaacagcatttcaaattttaaaattagagatcaaaataaaacaaaaaaattacaagatataccaccataaaaaaagtatatactttttgccttgaaaacttacaagatataccaacattaaaaaaaagaaaaagtatatactatatgtacaaggtcactcccaaagtactggtttttccttaaaaacaaatggtaaatcaaaacaattaccgcaacacattactgnttccnntcccccaagtgcaaccatggcag

SEQ ID NO: 3265 - DNA, 288 bp, Glycine max
  unsure (1)..(288): unsure at all n locations; Clone ID: 700557483H1
agtgaaagagtaagacaccacaaagtgtaacttgagtgattatatctgatgagtgcaganagaagggaggattgttggtgatcgatcatcgatcatcgatcatcgatcatcgatggcgtctgcnagccttggaagtggtggggtgggcagttccaggtctgttaatggtgnacttcaggggttcttccagttccgtcgattggcttggcagagagatgcttganatgtctttgagagaccacgaggacgatagagatagtgagcctgacatcattgatggtttgggtg

SEQ ID NO: 3266 - DNA, 290 bp, Glycine max
  unsure (1)..(290): unsure at all n locations; Clone ID: 700557484H1
ggaagatgagaagtgtgagcctgagaccagagcttcacattccaatttgttcttcaaaccctccatcatgtgtcaaacccatcaaattagtggtagcatcatcgtatgggaaaaatttgaaaaatccaccttccaaatttgcaatcactcttagagagcacagaacaactttggagcatgcggcganngttgccattactgaaacatgattccggtattgtggnaatgggagcggtgtgtgtggtggggatattggcggtggttctgagcgaggaaaaggccttggcttt

SEQ ID NO: 3267 - DNA, 287 bp, Glycine max
  unsure (1)..(287): unsure at all n locations; Clone ID: 700557485H1
ctcttggtaacattgctattggtaatcttccaaaatacttgccattncatcttggatcagattgataatcagcagaagaaacaatatctcttgcttcattctttgaaagaggtaattgtcagacaatctgtggataaagcagagtttcaagagtccagtgtggagaaaatacttaatttactnnntnaccactgtgaaagtgaggaagagggagtgcgcaatgtagtggcggagtgtttgggcaaaattgctcttattgagcctgtaaaactcatccctgcactcaa

SEQ ID NO: 3268 - DNA, 218 bp, Glycine max
  unsure (1)..(218): unsure at all n locations; Clone ID: 700557487H1
ggagtaccctcttcaatttccatcaattaagtttctctaataccctctgannnnnnnnnnnnnnnnnnnnnnnnngtcatggctcttgtgatatattttgtgcttnttcttgccctcactggccattcaagtgctctttactgtgtatgcaaagatggtgtgggtgatcaagctcttcagaaagcaatagactatgcatgtggtgctggagctgactg

SEQ ID NO: 3269 - DNA, 285 bp, Glycine max
  Clone ID: 700557489H1
gttgaatttttattctgttcattcgccttaagacaataatggggtctgtttgctcggctgagaaaaataaaaacaaagaggttggagggaaaaccttggggaagaagcttaagaagttaaaaagcattgcaaagggaaaaggagattgttattcaaattcaaggactagtgatcgtggtagaaagcaaaaggagcgaaactctggattttccagtgaattcaacttatccaatcctagtcgaaaagaaggaaaagaggacttccagagaggctccttttggggaa

SEQ ID NO: 3270 - DNA, 284 bp, Glycine max
  unsure (1)..(284): unsure at all n locations; Clone ID: 700557490H1
aacaactggggctacttacatagactacttagtcactgatgagtttgtttcaccactaggctatgcaacctgcaccaattcaagtttcatatatgggattccctggaacaactgnggctacttacatagactacttagtcactgatgagtttgtttcaccactagggtatgcaaatatatattcagagaagattgtacatctcccccattgctactttgtaaatgattataaacagaaaaatcaagatgtgttagatcccaactgcccacacaaacgatcagat

SEQ ID NO: 3271 - DNA, 285 bp, Glycine max
  unsure (1)..(285): unsure at all n locations; Clone ID: 700557492H1
atcaaggcagcngnggatcatgctgganatncagcacaantggggctttanaagcagcctatgcacnagcatttgggangagtatctctctntctgagcagcagctngtggattgtgctggccgtttcaacaactntggctgtaatggtgggttgccatcanaagcctttnagtacatcaaatacaatggagnacntgagacagaggnngcatacccctacactggaaaagnnggtgtatgcagttctcagcngnnnatgatgccgttcangacantgactcggt

SEQ ID NO: 3272 - DNA, 284 bp, Glycine max
  Clone ID: 700557493H1
cactttcaaatcaactcaagagattcaaccaagaaatatagaagctagggttttgttacatttgtgttagcacgcaatactttgcaaatatggagagcagcttaggagacatgttggttaaggttgtggtgttcattctagttcaagccttggtttaccttatcctctccaattcatcaaacgtgttcaacaagaacatgaagaaatctaacagcttcaggccggcacgttcggtgagcattcgccggatgctcgctttgatctctgattttcctccagaagaa

SEQ ID NO: 3273 - DNA, 286 bp, Glycine max
  unsure (1)..(286): unsure at all n locations; Clone ID: 700557494H1
cttcttctgtgtgccaccccctctttaatttcttcnttctttagcttttggagtttggagtcctcttgaaccatggctaagaanagaggagagttgnggattcatganagtgtggatgagctaaggactgatatggcacactatgttgctgagttatcagaggcatctgtgaaagagcgaggagtctttgccattgctttatctggtggtacctctcattggcttaatggggtatttgtatcttatcttttccatataatgtttctttgcttnnatgatttagtgg

SEQ ID NO: 3274 - DNA, 283 bp, Glycine max
  Clone ID: 700557495H1
atcctgagacattttacagatctatgattgtaacagacaacaaagtggtgaacaagatttgggagtcattagaaaagtatacaaagaagcttgcccgtgctgaagcagtatatgcagggtcgaaaacaacttcccaaaccagaaggaacaagacctacaaacaagactggcttccttggacttgttggtaaaaaggtggataccatagaatattgcaacgagaagattaatgaacttgaggccagattggaatctgagcaaaggtcactctcagagagaagca

SEQ ID NO: 3275 - DNA, 163 bp, Glycine max
  Clone ID: 700557496H1
tacgaggccatatgttttgtgtttccttgtactgcaatccaatactgtttggctgttataagttataaggattttttttatttgattagtttggtgctaatatctgtttgatgaatgttttggaaatttctgcatgagaaaaatttggacctactccaaccat

SEQ ID NO: 3276 - DNA, 191 bp, Glycine max
  unsure (1)..(191): unsure at all n locations; Clone ID: 700557502H1
ttgtgatagcacatggtcttcaagcctttctttaaccataattttaagtatgtaatgtgactatatgtgattgtgttagtntacagtagcaaggaaangaatagcaaccaaaaattagtggctgttgagggcatcctgtnagggaattgggaattgtgatcagcacatgatgagggtgcattgtgataacc

SEQ ID NO: 3277 - DNA, 294 bp, Glycine max
  unsure (1)..(294): unsure at all n locations; Clone ID: 700557505H1
gctgattcttgtatgacaaatcctcacgaagagagagagagagctgtgtctgaattctgaaaaattaaaccatgtctattacaacaacacaagctttgacccccttgttcgtcatcacgtaaaagtagaagtagaaccacatttggcgccaattccacctccacaagcttccccggctactccactctgcctccaatctcctcctcttcaagctcagtcacactncttccaaacggaacctcaaccaccttccatgccttcaagcgcttttccccggtcatggagtggcaggat

SEQ ID NO: 3278 - DNA, 287 bp, Glycine max
  unsure (1)..(287): unsure at all n locations; Clone ID: 700557506H1
gcngattcttgtatgacaaatcctcacgaagagagaganaganctgtgtctgaattctgnaaaattanaccatgtactattacaacaacacaagctttgacccccttgtcgtcatcacgtaaaagtagaagtagaaccacatttggcgccaattccacctccacaagcttccccgctantccactctcctcgaattctcctcctcttcaagctcagtcacacttcttcnaaacgaacctcaaccanttccatgccttcaagcgcttttcccccgtcatggagtggnc

SEQ ID NO: 3279 - DNA, 290 bp, Glycine max
  Clone ID: 700557507H1
ttactcctaacaagaaggcaaattcaggaccacttgatcagtatttgaagttaagagctcttcaaaggcaatcctatacacattacttctatgaagcaactgtcggagctggtcttccaattgttagcactttacgtggcctccttgaaactggagacaaaatattacaaatcgaaggcatctttagtgggactttgagttacatatttaataactttaaagatggccgggcttttagtgaggtagtttctgaagcaaaggaagcaggttatactgagccagatccaaga

SEQ ID NO: 3280 - DNA, 190 bp, Glycine max
  unsure (1)..(190): unsure at all n locations; Clone ID: 700557509H1
ttgattgcngggctgttaatcaatcatgcatagttttttatcntgttctgttcaaatatttagggatatatgcatcttcctaattaaatttatcanccgtcatggtgagtggttttgcaatggtaacaactgcatttagtggcaccaccaacttccatagaatggattttnaggtattggttncagtttc

SEQ ID NO: 3281 - DNA, 192 bp, Glycine max
  unsure (1)..(192): unsure at all n locations; Clone ID: 700557510H1
agccattcgtattgtcgcagagaaagaaaaccctagctcaccgtttcaagatgcaaatcttcgttaagaccctcactggtaagaccatcactctcgaagtcgagagttcagataccatagacaatgtaaaggccaaaattcaagacaaggaagggatcccaccagatcagcaacggntcatttttgctggna

SEQ ID NO: 3282 - DNA, 181 bp, Glycine max
  unsure (1)..(181): unsure at all n locations; Clone ID: 700557511H1
ctttccccgtcctcttctacctacttctccttttgtgcaacttgccttgtanaacaacacttccatatcctttgtgttgtgttgcccactctannnnnnnnnnnnnnnnnnnnnnnnnnnnnnnnnnnngacaacatcccaccatttgtggctgcctctatttnagccctagcttaannag

SEQ ID NO: 3283 - DNA, 188 bp, Glycine max
  unsure (1)..(188): unsure at all n locations; Clone ID: 700557512H1
aattcacnaccgncaatggcgacaaaacctcgtttggcttatctctcttccacttttcttcttcttctngttgtaactgtcgtacttcggtgtcggnacaagccccagaatccccatcactctacaacacttccttcaatgctcaccaaatacacaantaacccctccaacatagtcttcgccaacac

SEQ ID NO: 3284 - DNA, 290 bp, Glycine max
  unsure (1)..(290): unsure at all n locations; Clone ID: 700557513H1
cgatcccggcgaatcgaactccaacggttctagaaatcggcgaagaccaactgcgactagcgccaatgcggagttcgaattccgaatcctaagacggaaactggaatcgctggttccgcgatcctccgtctccggcgccggtgatgactccgcagtcgcgttgtagctcgcgactgatctcgccgaagcagaggttcgccgtctccagcttccggccggaattgcgtccctgaattgttccgtttttttatttgtngtattcgagattgaaattcgtgnngcgaangatg

SEQ ID NO: 3285 - DNA, 294 bp, Glycine max
  unsure (1)..(294): unsure at all n locations; Clone ID: 700557514H1
aggcaatgtagattttcatcagaatagggctcacataacaacatacagttacgtatatttaaggaacaaggtgaatacacatgtagggataggcatgcttgacattatggctcttaaaagatggtgctcttaagaactgtatgttgttatgtgaggcaatgtagattttcatcagaataggctaaaacaatgaacagcagatcattctttgattcttagagtttgtataggatatatattactctgntacttacgtataattctttatattacagtatgaagccttgtactatt

SEQ ID NO: 3286 - DNA, 296 bp, Glycine max
  unsure (1)..(296): unsure at all n locations; Clone ID: 700557515H1
cagcggcttcttcttccgttttcctgaatcggtgtgaacaatggcgacgtacgctgcgatgaaacccaccaagccagggttggaggagtcccaggaacagatccataagataaggatcaccctttcttccaagcacgtcaaaaacctcgagaaggtttgtgcggacttggttcgtggtgcaaaggacaagcgcctcagggttaagggacctgttaggatgcccactaaggttccttnacatcactaccaggaagtccccctgtggtgaagtaccaacacatgggatagatttgact

SEQ ID NO: 3287 - DNA, 169 bp, Glycine max
  unsure (1)..(169): unsure at all n locations; Clone ID: 700557517H1
aagtatcagatctggagcaggagaanagcgttggcagcgnttgcgtttgctnctgntgttccaatcggnctcagcagacgacgtcgttgtgctctctgaagataacttcgagaaggaagttggtcaggacagaggagctctcgttgagttctatgcnccttggtgnggg

SEQ ID NO: 3288 - DNA, 190 bp, Glycine max
  unsure (1)..(190): unsure at all n locations; Clone ID: 700557518H1
gaattcacaaccgacaatggcgnnaaaacctcgtatggcttatctctcttccacttnncttcttcttcntgttgtaactgtcttgacttcggtgtcggcacaagccccagantccccatcactctacaacaccttccttcaatgcctcancanatacacnaataacccctccaacatagtcttcggcaac

SEQ ID NO: 3289 - DNA, 100 bp, Glycine max
  unsure (1)..(100): unsure at all n locations; Clone ID: 700557519H1
aattcacaaccgacaatgggcgacaaaacctgcgtttggtcttatctcctgcttccacttttcttcttcttanntgttgtaactgtnctttacttcggtg

SEQ ID NO: 3290 - DNA, 286 bp, Glycine max
  Clone ID: 700557521H1
tgctctctgatacaaaaacaacaagaactaaacacccttctgtttctgtatgcaaagtctcaaacttttccacctcaaccaacaaaaaacaaaccttgctgcaaagttgcatatcaaaaactttgcatggggggctgattcttgcagcttccgttgtaaatggtggagctgccacagctttaacgtacgatgaagccctgggacaacctttgagcctccctggtgctggggactttgatgtgaacggttttgtggagagtgtcactggctttgcagctgaaaaccc

SEQ ID NO: 3291 - DNA, 288 bp, Glycine max
  unsure (1)..(288): unsure at all n locations; Clone ID: 700557522H1
aagaaagaggagcacaaaggagaacaccatggtgagcacaaaggtgaacacaaaggagaacaccatggtgagcacaaaggtgaacacaaaggagaacaacaccatggggagcacaaggagggacttgtggataagatcaaggacaagatccatggtgatggccatgacaagggtgnnnnnnnnnnnnnnnnnnnnnnnnnnnnnnnnnnnnntggacatgaccatcatggtcatagcagcagcatgacatgattagatcttatatgttaagcaggtgtacggtacgat

SEQ ID NO: 3292 - DNA, 79 bp, Glycine max
  unsure (1)..(79): unsure at all n locations; Clone ID: 700557523H1
ggaaacaaaacaacccattgncgagcttgcacaactctccatggtagnagtagcacttactaactttcaccacactnct

SEQ ID NO: 3293 - DNA, 191 bp, Glycine max
  Clone ID: 700557524H1
ccaatctcaatcccagtgagtgctttctttctgtaactaaccccaatcatcaactcagtcagcgaatgaatctgtggacggacgagaactcctcggtgatggaggccttcatgccatcctccgatctctcctccatctggccccctcccgctcctccgcagccgcaatccacggcggtcttcaatcaggac

SEQ ID NO: 3294 - DNA, 96 bp, Glycine max
  unsure (1)..(96): unsure at all n locations; Clone ID: 700557525H1
actgganttncaactgaagtnangtctgtaggagntgcaccntgnatctcttacagaggcacatcctggtgacaatntggtnttcnntgttaagag

SEQ ID NO: 3295 - DNA, 288 bp, Glycine max
  unsure (1)..(288): unsure at all n locations; Clone ID: 700557527H1
gtaaaactcaaaagaaattngttttccatgtttctgttagcaagctctcattcgggtcgagtcgggtaatcngatccgatcggcgctgtgatcggatcatcgatttgacgcttgtttgggagagangcatttcattgccaatgggaatgcncaatcccaacaacattcttcccagtcntcctcgtcacntcgcaccatgagcaaanccctgggaggaacaanagaagacgaagacgaagaagaacaacaactactagaacaagacnaagattgttctncgactnacac

SEQ ID NO: 3296 - DNA, 190 bp, Glycine max
  Clone ID: 700557528H1
atcgaaagcagaagcagaagcaggaacctgagttgacgcgaatggagggagaatcgaaggaagatgtttggtgcagagaaacagtgccaaaggtattgaaacttgtctgttccacattacctctgtctctgtctcacacaaacctcgtttctctccttctggtctctccctcccttcatcgcacccttct

SEQ ID NO: 3297 - DNA, 181 bp, Glycine max
  unsure (1)..(181): unsure at all n locations; Clone ID: 700557529H1
ctgtaacacagaattaaaggatctcaaatccattttccctcgtgttaaggatggagacgttccttatatatgcttagatcttgtatacgantatacattggctcgttgatggatttggcatagatccgcagcaagagattacgttggtgaggcaagttgagtatcaagattctctcgtgga

SEQ ID NO: 3298 - DNA, 297 bp, Glycine max
  Clone ID: 700557531H1
gtttcatgaggatgaagaatttgaaagccagtgtgctaaggagatccaaagaagaaaagaagttgaagaacaattggcaagggaaaagcaagaagtacagaaaatgaagaatcagcgagatgaaatacttgaagaattgcaaatggtccaagaccaaaattcagcacttatgaaccaaatttctgagtcccagtgtacggaaacagagttggaggagaagatcatatcagctgtggacctcttgataagtttcagggaacagagagataggcttaggatagagcatgcaaatgcact

SEQ ID NO: 3299 - DNA, 98 bp, Glycine max
  Clone ID: 700557532H1
ttgttttggcctacgagccagtttgggccattggaacaggaaaggttgctactcctgctcaggctcaagagggtccatgctgatttgaggaaatgggt

SEQ ID NO: 3300 - DNA, 277 bp, Glycine max
  unsure (1)..(277): unsure at all n locations; Clone ID: 700557535H1
cgggatcttatcaacatactggaggatgctattagaagtggacaccctatattgattattgctgaggatattgaacaagaggctttagcaactcttgtggtgaacaaacttagaggatcactgaagattgcagcactgaaggcccctgggtttggagagcgcaagagccagtaccttgatgatattgccatcttgactggaggtactgtaatcagagaagaggttggccttactttggacaaanctgggaaagaggttctcggatatgcctccaagg

SEQ ID NO: 3301 - DNA, 284 bp, Glycine max
  Clone ID: 700557536H1
ttcgttatccttctttttttctccttgaactcgaatattcactatggcagatgaggtggttctgctagatttctggccaagtccatttgggatgagggtcaggattgcacttgctgaaaagggtatcaaatatgagtccaaagaagaggacttgcagaacaagagcccttgctcctcaaaatgaacccggttcacaagaaaatcccggttctcatccacaatggcaaacccatttgtgaatctctcgttgctgttcagtacattgaggagtctggaatgacaga

SEQ ID NO: 3302 - DNA, 188 bp, Glycine max
  Clone ID: 700557540H1
agcagtgcagtccttggatgctttcgaaagtctagtacctgattttatgaagccaagaattagtgaggttgatgagctgctggctcttggggtcaacgtgactgtgtacagtgggcaagtggatctcatttgtgcaaccaaggggactgaagcttggcttaaaaaactcgagtggacagggcttcaaa

SEQ ID NO: 3303 - DNA, 188 bp, Glycine max
  Clone ID: 700557541H1
aggaactggtatgaaggtttctataagacatcttggcccgtccatgattcagcagatgcagcatgcttgcaatgaatgcaagggtactggagaaaccatcaacgacagagatcgctgcccacagtgcaagggagaaaaggttgtgcaggagaaaaaagtccttgaagttattgtggaaaagggaatgc

SEQ ID NO: 3304 - DNA, 188 bp, Glycine max
  Clone ID: 700557542H1
ggctggttcaactgaggtgatgggctttgaatttgccttctcccgcccaagtgaagcccttatttttctcttcaaataactccacaaaacttccaggtagcttttctttgaagagaaaagatagtgacacaacagtagagagacgagtttattgctctgccgctgctcaatcaccaccaccagcatgg

SEQ ID NO: 3305 - DNA, 284 bp, Glycine max
  unsure (1)..(284): unsure at all n locations; Clone ID: 700557543H1
ttatatctatatttcagttcattttgttctccaataatttcttctgctactttagagaccttgctgcaaaggttctctcttagcatggtaacaatgggtttgaaagcactttttgtttggtgcataatatggttggcgtttgcacagttgtcactaggaggaagagtgaggcattacaagtttgatgtggagtattgatcagaaagccagattgcttggaacacgttgtgatgggaatcaacggccattccaggcccaactattaggggctgaanttggtgaca

SEQ ID NO: 3306 - DNA, 289 bp, Glycine max
  unsure (1)..(289): unsure at all n locations; Clone ID: 700557544H1
gnnagcagtgagtgaggtcagcaatagcaatatgcggcagtttgaagataatccaggtgatttgcctgaggatgcaaccaaaggggacagcaatgtagcctctgaagacaactcaaacttgtcagataaacaagaagagaagtcggaggaaaatcctgtagagangtctctgacgatacaaagtcggaagacgtggaggataagaaaactgaggaggaaggttctaatacagaaaatgaatcaaactcagactctacagaaattagcaagacagtgatgagacttccat

SEQ ID NO: 3307 - DNA, 100 bp, Glycine max
  unsure (1)..(100): unsure at all n locations; Clone ID: 700557545H1
tttctctgtccttcattttagtttttacggctagaagaatgtccagcttcatcggaatatttggtnattttcccggcccacccaccccggcgaactcttc

SEQ ID NO: 3308 - DNA, 189 bp, Glycine max
  Clone ID: 700557546H1
atccattccatttctttccaacacacactttctctctctatctttgggtgtctttctttttgttcattgttgatgatgtcacgcgccgccgtgctattacacgcgccggaggaagatgcggcggcggaggagtgctgtacctcgacttcgtcgtcgtcgatcgggaggaacagcgacgtgtctccgaaa

SEQ ID NO: 3309 - DNA, 293 bp, Glycine max
  Clone ID: 700557547H1
gcaaatgacacagcacaatttgctgagctcttgacacaaggagaactgacccgtagagcatgggaaaaggatgttcaggtgatgaatgaaggacctggacacatcccaatgcacaagattcctgaaaacatgcagaaacagttagaatggtgtagtgaagcgcctttttacactcttggtcctttaacaactgatattgcccccggctatgatcacatcacctctgcaattggtgctgccaatattggggcattggtactgctcttctctgttatgtgactccaaaggaacat

SEQ ID NO: 3310 - DNA, 194 bp, Glycine max
  Clone ID: 700557548H1
aaaattaatgcccctttcattttctctgcatctgtagtatctatcaccaatcaattccactcttcttcccatcaaacaacaaaaaatcaatctgggaaacaaaaacaaaatgccgtcattagaggaggaactcttcccatcaaccccaggaaagttcaagatcgagcggtcccaccacatgaaccgccaactct

SEQ ID NO: 3311 - DNA, 183 bp, Glycine max
  unsure (1)..(183): unsure at all n locations; Clone ID: 700557550H1
attaattcggccccgacagtattatcttcaattgaaattacgtgtgacttagaagaagaaaaaaagatgatgatgattttgtttgtaatttatnttatttgttttgggttttttttttaattttgtagatttttcttttatgatgggtaagtagggattnnaatttgtaattgtnatnggccg

SEQ ID NO: 3312 - DNA, 185 bp, Glycine max
  unsure (1)..(185): unsure at all n locations; Clone ID: 700557551H1
gaattgttgtaactttttgattcctatattctctaaaattcgaaattctaatttcgttagggnaaagagattgtttgtgtgtgagtgagtatggctggaaaangcgagggtcctgctatcggaatcgatttgggaacgacgtactcttgcgtcggcgtgtggcaacacgattcgtgttganatca

SEQ ID NO: 3313 - DNA, 93 bp, Glycine max
  unsure (1)..(93): unsure at all n locations; Clone ID: 700557552H1
gagcctttatttggagttgcaaggcattggttactgagattcaaggcanncacaaaaggaggttgaaaggatgcttcaagagcaaagattcca

SEQ ID NO: 3314 - DNA, 288 bp, Glycine max
  unsure (1)..(288): unsure at all n locations; Clone ID: 700557553H1
atcgacgtccgtccttgaattcctgacgcaaaaccttgaaggtaatgaaagactagctaaatacatgtcctaccccagcggacaancccgaccatggacctactcaaagagaatcttgacttgcccattgatcttaggaaaggtactcggtctacacgtaatccttatcctatttataacttcttaagtnatcattgtctctcttcttcataccattcttttgtttcctctttatcttctatttctcttcctaaaaatctttgtgaagcacttgatcatctaggatgg

SEQ ID NO: 3315 - DNA, 284 bp, Glycine max
  unsure (1)..(284): unsure at all n locations; Clone ID: 700557554H1
cgtacagctttctatgaaggcattggacttaacacaaaagaatttgacatgcatgtcatcatcgagacaaaccgcacaactgctaggattttcccagctgttcttgatgttgaaaacccagagttcaagcggaagttggaccggatggtggagataaacgagaagattattgctgttggggagaagtgatgacatagcggtggtgaagaacttgaagaggatcccactggttgctgcattggtgtctgaactcttggcaacatatctaatgcctccantgagtc

SEQ ID NO: 3316 - DNA, 85 bp, Glycine max
  unsure (1)..(85): unsure at all n locations; Clone ID: 700557555H1
gccgtaaacagatgtgaacggttccttcctccttcattgttcgcctcatncaacattacctccttcttgccaccgtatcatagga

SEQ ID NO: 3317 - DNA, 289 bp, Glycine max
  unsure (1)..(289): unsure at all n locations; Clone ID: 700557556H1
gggcgtacctgagcgagtaactgatgaggtgttcatagcaatgtcgaaggcactaaacttcatcaatcctgatgaactttcaatgcaatgtatattgattgctttaaaccgatttcttcaggagaaacatggttctaagatggcctttttggatggcaatccccctgaaagactttgtatgccgatagtngatcatattcagtccttgggtggtgaagttcatctaaattcgcgcattcaaaaaattgagctaaatgatgatgggaacggtgaagacttcttacttaat

SEQ ID NO: 3318 - DNA, 288 bp, Glycine max
  Clone ID: 700557559H1
gccatattccacaagaactctccaaggatcctccttcccacgagattctttggtgggaaaaatccaagaggtttgaaatttgaaggcagggaagatggattatttcaatgcaccaggaagaaaccatctctttgttccagggccggttaacattccggaccagatcatccgggccatgaacagaaacaatgaggactaccgttctccagcaattccagctatgacaaaaactttgcttgaggatgtcaagaagattttcaagaccactatggaaccccatttctcatc

SEQ ID NO: 3319 - DNA, 285 bp, Glycine max
  Clone ID: 700557561H1
gttgaggaaatgggaacccttgggagagcgatctacagcgttggtaactggattcgagggactggacaggccattgatcgtctcggttccctcctccagggcggttactacgtccaagagcagctgtctaggcatcgaactctgatggacatatttgataaggctcctgttgttgatgaggatgtatttgttgcgcctagtgcctccgtcattggagacgttcaacttggaagaggatcatccattggtatggagttgtcttgaggggtgatgttaacagcatca

SEQ ID NO: 3320 - DNA, 290 bp, Glycine max
  Clone ID: 700557562H1
cttctctctctttctctctttctagttcgtgttcttcgtcgcaaatccgaagtaggatctctcttgttttttctctaggtttttcgcgatggcgtcgaagcgaattttgaaggagcttaaggatttgcagaaggatcctccaacatcttgcagtgccggtcctgttcatgaagatatgtttcattggcaagctacaattatgggtcctccagacagtccctatgctggaggtgttttcctagtgactattcattccctccagattatccctttaagccacccaaggttgc

SEQ ID NO: 3321 - DNA, 129 bp, Glycine max
  unsure (1)..(129): unsure at all n locations; Clone ID: 700557564H1
tagtgcctccttgccagaagttaaaatggcncaagaaactttcctattcacatctgaatcagtgaacgaggggcaccctgacaagctctgtgaccagatctccgatgctgtgctcgatgcatgcttgga

SEQ ID NO: 3322 - DNA, 91 bp, Glycine max
  unsure (1)..(91): unsure at all n locations; Clone ID: 700557565H1
ctaaatttgggaaggaaagtagtcaaagctgtnacatacagggtcaantctgtgncctcnacttccaagccttgtgtnantgagnnnttnt

SEQ ID NO: 3323 - DNA, 243 bp, Glycine max
  Clone ID: 700557566H1
gcattacatcacaacaacaacatggctgccactgctgctgcaggcatagcttccttgttttcttcttctattaacagtgtcaaatgtcttcgttcctccaagaactgctccataatagaccctctcataacaacagtgccctcaaaccgtggcatgtttgggtcacacttggtggaacctttgtccattaattcgcacaagttgtggggacctagaatttctgctgctgttgcacaagaagag

SEQ ID NO: 3324 - DNA, 282 bp, Glycine max
  Clone ID: 700557567H1
gatttcggccgtttgctccccaaggaaagaagcagagtgtttcttttgaaatcagctagaaaagatgtcagggaattgttttgtaaaaatttcaaatggattagagaaatatgtaagagctgctttggagaattgaatccgacagcactgcaccttagttatcattagaagaaattaagaaaagctacagaaactaatcatttgtattagtgtggaaatcatgtagaagctgctgtgaagaggtagctgttgcagctgaggcacctgctgctcaattccagg

SEQ ID NO: 3325 - DNA, 284 bp, Glycine max
  unsure (1)..(284): unsure at all n locations; Clone ID: 700557568H1
ctcaggntctgtgacacacacagactcacttcaagttcccagcttttnccatttttcccactgtttattgagaagaactgcagaacatggcacagncttggctccctctacgcaatggcagatgagaatctcaaaatcctctcccaatgcaactcccattacatcaaacatgtggagttctttattgtggaaacaaaataagaaagtttcacctaccagttctgctaaatttagagtgctggcaattaagtctgacnatagcaccatcaacaggctcgagggtc

SEQ ID NO: 3326 - DNA, 262 bp, Glycine max
  unsure (1)..(262): unsure at all n locations; Clone ID: 700557569H1
ataaaaaatgggaaggctttaagcacttatatacggtagcanacagttgaaaacaaagggnggtctggcggctagaactgccacaagcaacgtgttctgtagtgctggttacaagtgtgcaatgagggcactccaatcccaatgctgcagcccggatgaagtgatatttggtcctgattttttccaatcactgtactgccatctgctgtgtggtctgattttccgggaggaagttgagtttgtatctccacatttgcacata

SEQ ID NO: 3327 - DNA, 275 bp, Glycine max
  unsure (1)..(275): unsure at all n locations; Clone ID: 700557570H1
gcaaaccaccatagagactatgttttgagtcacactcacacgggactcaaaaaggnacctgttgcttggctagtgggtaaaacaattggactctacttctcagcggaatggtgcgtcccatgcgccaagttcactccaaaactgatttctgtttacgagaagataaagcacgagctagccggaaagggagaggaagacttcgaagttgtgctaatatccagcgaccgcgaccaagcatcctttgactcctactacagcaccatgccttggttagc

SEQ ID NO: 3328 - DNA, 284 bp, Glycine max
  Clone ID: 700557571H1
tgaatgtctcaaaaccagaacgactgtgcttacactttccctgctacaacttctgctactcccagtagaccattcccttttcttatgaatatcattccaaccactgccaacaattcggttcaagaccaccctcaaacaccatccaaacctgttatttgtgatctaccattggctaggaaagcttcacttcatcggttcttggagaaaagaaaggataggtaagtaggctgagtcatggaaattaatacatcaacgaagtataccttcagtttcttcaaaattgg

SEQ ID NO: 3329 - DNA, 287 bp, Glycine max
  unsure (1)..(287): unsure at all n locations; Clone ID: 700557572H1
atcgagataactagaaacagtgtgatgaaaatgaaggtccttgttttcttcgttgctacaattttggtagcatggcaatgccatgcgtacgatatgttccctctccgaatgaacactggctatggtgcccgtactccggaggtgaaatgcgcaagttggaggcttgctgtggaagcacacaacatctttggctttgagaccattcctgaagagtgcgttgaagcaacaaaggaatacatccatggcgaacaatatagatcagactcnaaaacagtnaaccaacantt

SEQ ID NO: 3330 - DNA, 91 bp, Glycine max
  unsure (1)..(91): unsure at all n locations; Clone ID: 700557573H1
acttgactcgattgcaagtgatccacgacacactgttcgcttcacaaaagcttcgaatccaattcctcagtaacatctgcnggaagtcttc

SEQ ID NO: 3331 - DNA, 283 bp, Glycine max
  unsure (1)..(283): unsure at all n locations; Clone ID: 700557574H1
cgcaaagaacaacaaactaattaggtactgaccatttccgtctatatataaggccaataacccaacacgttctataaacatatagtgactaacctcccactgaagagtaattggtggattccagcaatggccgtggttcatggcagttgggtcaagcttgatccaaagaggagaagggcaaggagcgagaagctcacatgctatagccatagtagcacagaaggtgtatgcatttggtggcgattcgtgccacgtgtcccgttgaaaaaacttcccgntcgcc

SEQ ID NO: 3332 - DNA, 185 bp, Glycine max
  Clone ID: 700557575H1
agagaatgacaggatcttctttggggtacccattttctcctacaaggaacttcaagaagcatcaaacaattttgaccccactagaaaactaggagatggaggctttggcactgtttactatggaacactaagagatggaagggaagttgcaatcaagcatctatttgagcacaattacaagagag

SEQ ID NO: 3333 - DNA, 285 bp, Glycine max
  Clone ID: 700557576H1
gtggcttcaagaagagaatctcaatggaggcccaggagctgaagcgcgtgttccagatgttcgaccgcaacggcgacgggagaataacgaagaaggagctgaacgactcgctggagaacctgggcatcttcatctctgacaaggacctgagccaaatgatccagaggatcgacgtcaacggcgacggttgcgtggacatggacgagtttggggagctgtatcagaccataatggacgagcgcgacaatgaggaggacatgagggaggcttcaacgtcttcgacca

SEQ ID NO: 3334 - DNA, 284 bp, Glycine max
  Clone ID: 700557577H1
ctgaaaagaaaggaaagaatgatagaaaatctaaaaatgtctacatagcctgggaagacaatttgtcaacatccttcaaaatttaagatttagggttgacactttagcggccacatttgttcacacataaatagcagtttctgcaatgagaacacacatagttgcctcgcactattaaaggtctatgccttaatggtttgtagaatccgttctggagatatgagcaagcccacagattattttttggttttcccgtgggtgtgcaggtttacaggatgcaaatt

SEQ ID NO: 3335 - DNA, 285 bp, Glycine max
  Clone ID: 700557578H1
gtacaacaactcactcactaagctaaacaatttcatcaagcctgccatggcttcctcgtgtgcttcctctgccattgcagctgttgccatctccacaccaagttcccagaagaatggatcactcttgggaagcacaaaagctctttcttagtgggaggaaactgaaggtgaacagttttacagcaccagttggagcacgatccagcactacagtgtgtgcagttgctgagcctgataggcctctgtggttcccaggcagcacccctcctccatggtagatggcag

SEQ ID NO: 3336 - DNA, 188 bp, Glycine max
  Clone ID: 700557579H1
atttggtgagagtggaagaccagccttaggagatgaaggtgccgtacctccaaatgcttatcttcaattggatcttgagttggtctcgtggaagaccgtgtctgacattaccaaggatagaaaggttctcaagaagactttgaaggaaggggagggatatgaacgaccaaatgatggagctgtagttc

SEQ ID NO: 3337 - DNA, 95 bp, Glycine max
  unsure (1)..(95): unsure at all n locations; Clone ID: 700557580H1
gcttgttggttttgtatttgcaggaagctgtggtaagannaagagagagaagggttaggtttttccttctctctctttctctttgtgtttttgnc

SEQ ID NO: 3338 - DNA, 89 bp, Glycine max
  unsure (1)..(89): unsure at all n locations; Clone ID: 700557581H1
aaggttgttnttgtnttgtttcgtgtnttcnctctaatcattcgaatggccaaagaaggacctaactgggacgggnnnctganatggag

SEQ ID NO: 3339 - DNA, 96 bp, Glycine max
  unsure (1)..(96): unsure at all n locations; Clone ID: 700557582H1
actggactgacanctgntagtacaantcngtggggatgncacnatgnnntctcttanngtggcaacatgcctggtgatcaatgtgggatgcaatgg

SEQ ID NO: 3340 - DNA, 284 bp, Glycine max
  unsure (1)..(284): unsure at all n locations; Clone ID: 700557583H1
aacacttaatttctcatctcatcatttctaattctacctcttttctcttgcactaacaatccaagatgaataccaacaacgacaccgaaaaaaaccaatcatttccagaagcacaaggnnnnnnnnnnnnnnnnnnnnnnnnnnncaatgttgggactgagaattggggaactcacataatgggcacccctgctgttccaagcagccacccagataacaaaaaagcagnttacaaagtggacaacctcaaccagttcaatactaccatgaccaacatcaacatc

SEQ ID NO: 3341 - DNA, 280 bp, Glycine max
  Clone ID: 700557584H1
atgtctcctacccactgaagtcgaacccctatttttcctctccctaatggcttctcaagttcttcttcagcaggcactgtttgcccccaagctaagtttcccttcttcttctcgtaacgtggcgttaatttctagggttccttccaccccaatttcatggcgttgcactcccctcattgctaagcctagtttcgtagtgagagctgacaccaacctcgatggcggtggtgaagccaccgaggatgttccttcggataatgctgaaaaagtttcggaaggc

SEQ ID NO: 3342 - DNA, 282 bp, Glycine max
  unsure (1)..(282): unsure at all n locations; Clone ID: 700557585H1
ctggatcanattgcacaatggacagctacacacttcagacagttctaaggagaggtgcaaccccctttgaatcatattntntacctgtggctgttggtgaaggagcatcttctgccaattttcctcttgagccacttttaaacaagtcatcaaatgtgggagaaagtggtgacatttggacttattttactttggatattccccgtggtgnagctggncggantattcacatanggctatctgcagatgtgaagatcagttangaagtctatgcnnnnnnng

SEQ ID NO: 3343 - DNA, 184 bp, Glycine max
  Clone ID: 700557588H1
atcactatcaccaatgacaagggtagattgtcaaaggaagatattgagaagatggttcaagaggctgagaagtacaagtctgaggatgaagagcacaagaagaaggttgaggccaaaaacgcttggaaaactatgcatacaacatgaggaacaccgtgaaggatgacaagattggtgagaaact

SEQ ID NO: 3344 - DNA, 184 bp, Glycine max
  unsure (1)..(184): unsure at all n locations; Clone ID: 700557589H1
tgactcaacctaggatatacgcatgacaaacattgccgaccttgatgtgcagttgaagagttgaagatgacacagctctctgaatgtacgtgaaggttcttgtagtgggagaaaaagttgngtgtggaatgagcaanagttgaaaaagttccattgttgaaacatttgcagcacgggntatcnc

SEQ ID NO: 3345 - DNA, 91 bp, Glycine max
  unsure (1)..(91): unsure at all n locations; Clone ID: 700557590H1
gctgtttttgtttatacgttggtgaacactggtaaggaaagagctaaagtncagccttttgtttacttggggcgaattccattggtggaag

SEQ ID NO: 3346 - DNA, 286 bp, Glycine max
  Clone ID: 700557591H1
ccttaaccctttgaacatcgttttgcagccatggaaacaggcatagcatgctacactcgcgggcctttcttgcctagtgtttcttccaagcactctccaccttccatttctccatcttttggcttgaggagtctgaaatcaagctctttatttggagaatcgctaagagtggcctccaaatcaacaataaaggtttcaaagacaaagaatacttcactcgtgaccagatgtgaaattggtgacagtctcgaagaattcctcacaaaagcaacaccagataaggggt

SEQ ID NO: 3347 - DNA, 286 bp, Glycine max
  unsure (1)..(286): unsure at all n locations; Clone ID: 700557592H1
gtgacatctcgggtttatccaacaaaggcaatctatggagctgctaggttgttcttgttcaacaatgctactgaggccactgtgacagcctcactcaatgtttggcaaatgaattctgcatttatacgcccattccaccctgatcagaagaattaaaataaataattaaattggatataaaagacttgtagtcacaaaggatcggaaaacatcttggggtggcaatttgtactcatcaattgtttaccttcccataaacacacataaagttatgggttcttgctna

SEQ ID NO: 3348 - DNA, 292 bp, Glycine max
  Clone ID: 700557594H1
gtttcatttgtgaaactaacaacaacacaagggccatcatcatgggcagctgcttccccaatgggcaagccaactcaagtccaccttcactaggactcttgtagctcccaagggcctctctgcctcttcaccacttcacctcgtgccttctagaaggcaatttagcttcactgttaaggccatccaatcagagaagccaacctatcaagtgattcagccaatcaacggtgacccattcattggaagcctggaaaccccagttacatccagccctttgatcgcatggtattgt

SEQ ID NO: 3349 - DNA, 292 bp, Glycine max
  Clone ID: 700557595H1
tgctgcattgaagggttcagatcatcgccgtgcaacaaatgtcagtgccagactggatgctcaacaaaagaagctcaaccttccaatccttccaaccaccactattggatccttccctcagactgtagaactgaggagggtacgccgtgagttcaaggctaacaagatctccgaggaagagtatgttaagtcaattaaggaggaaattcgcaaagttgttgaacttcaagaagagcttgatattgatgttcttgttcatggagaaccagagagaaatgatatggttgagtac

SEQ ID NO: 3350 - DNA, 95 bp, Glycine max
  Clone ID: 700557596H1
attttctacttccgtcaaattctccttaaacccgaataaaatttctcttccgttcgccggaaacaaaaaacctctttcggctccaattcgaaggg

SEQ ID NO: 3351 - DNA, 103 bp, Glycine max
  unsure (1)..(103): unsure at all n locations; Clone ID: 700557601H1
gctgctacanaagtctcccttccaatgatcatctgaaattacannaggattnatagggtcatcaagaactgcnttcagcatcacnaaagggtnttgttctttt

SEQ ID NO: 3352 - DNA, 224 bp, Glycine max
  unsure (1)..(224): unsure at all n locations; Clone ID: 700557603H1
tcaagttcaagattgtcaattcgtcatatttttagaataaagtgtaacattttanaatcattaaattggacaataatgtgtaacattttaaaatcattaaattggaattccaagtgacagccacttatccctgccactcaaataaatcattctcaaatgttacacattattgttcaagttcaagattgtcaattcgtcatatttttagaataaagtgctgatga

SEQ ID NO: 3353 - DNA, 286 bp, Glycine max
  unsure (1)..(286): unsure at all n locations; Clone ID: 700557604H1
ctcagaactcactacgacatcatcggtttcacaatataaacaaaaacggtgtcgtattttaaataaaacgcagacaatgaggtgtaaganacacttaccggacctcacaagcaccatcggcgtgtgcgcttcatgcctccgcgaacgcctccagcctctccttgcagcccaggcccaatacagaacgttccaccaattccgacgtggataataataatcatcgtcgaagaaagcccaagctcaagcccgaagaaaaccctctgccgctcatttcccgcgctccgtg

SEQ ID NO: 3354 - DNA, 277 bp, Glycine max
  Clone ID: 700557605H1
caacaagctaggatttgttgttctgttgccccaaatgaagtgcaggtgccagctgtgaaaacctcggatcccaagagtaagcctgagtgctatggtgtcttctgccttacctatgatttgagggctgaagaagagacaagatcctggaagaaattaattaacattgcagtctcaggtgctgctggaatgattgcaaatcatctacttttcaagcttgcatctggtgaagtttttggcccagatcaacctattgctctcaaattattgggatcagaaa

SEQ ID NO: 3355 - DNA, 290 bp, Glycine max
  unsure (1)..(290): unsure at all n locations; Clone ID: 700557606H1
cgcgtttctcgatcacacagaacaattcaattcatcagcgtgtctccacattttccgcgcgtgaaacctacatcgccannnnnnnnnnnnnnnnnnnnnnnnnnnnnnnnnnnnnnnnnnnnnnnnnnnnnnnnnnnnnnnnnnnnnnnnnnnnnnnnnnnnnnnnnnnnnnnnnnnnnnnnnnnnnngtggcggcagtggtagtatttggaaattgaggattgagtggggtgtgtgaaaaatggctgccaggagtgatcaccaaacggttcctctttcggtgctcctga

SEQ ID NO: 3356 - DNA, 287 bp, Glycine max
  unsure (1)..(287): unsure at all n locations; Clone ID: 700557607H1
gtagttgagaactaagaagaaggaaatggcttcctcaatgatctcctccccagctgttaccaccgtccaaccgtgccggtgccggcatggttgctccattcaccggcctcaaatccatggctggcttccccacgaggaagaccaacaatgacattacctccattgctagcaacggtggaagagtacaatgcatgcangtgtggccaccaattggcaagaagaagttcgagactctttcctacttgccagacctcgatgatgcccattggcaaaggaagtcgaatacc

SEQ ID NO: 3357 - DNA, 287 bp, Glycine max
  Clone ID: 700557608H1
gctgacaatgcaaaagtggaacaaaacaaaacttgtcccaaagatcataatcaccgccgaacctactcttcccttccaataaaaagaaattcaactttatccgatactctaccgctttcattttaatctcatccttctccgtttccttcaaaacccaaacttgaacttcttgtttcttgctcgtggaagcaaatgacaaccacgccctgtgtaactggtgccttgtcaaacgcggtcggattccgtgactggaaaaagcatgtccctttatcagcttctctctgtaa

SEQ ID NO: 3358 - DNA, 294 bp, Glycine max
  Clone ID: 700557609H1
agaacaagtagttgagaactaagaaggagaagcaaatggcttcctcaatgatctcttccccagctgttaccactgtccaaccgtgccggtgccggcatggttgctccattcactggcctcaagtccatggctggcttccccaccaggaagaccaacaatgacattacctccattgctagcaacggtggaagagtgcaatgcatgcaggtgtggccaccagttggcaagaagaagtttgagactctttcctacctgccagaccttgatgatgcacaattggcaaaggaagtagaa

SEQ ID NO: 3359 - DNA, 102 bp, Glycine max
  unsure (1)..(102): unsure at all n locations; Clone ID: 700557610H1
ctgcaacttagccacttgaacccccttcgtaagcctctagacacatcttcacttcttcacttcttcttccgcactaatacgaaaannagagggaattcacaa

SEQ ID NO: 3360 - DNA, 280 bp, Glycine max
  Clone ID: 700557611H1
ataagcccagcatggccaccgcaacagcagcagccacctcgtccttcatggggacgcgcctcctggaggcccactccggggcggggcgggtgcaggcccggttcgggtttggcaagaagaaagccgccgccccgaagaaagtttccagggggtcgggctctagctccgataggcccctgtggtatccgggcgccaaggcgcccgagtacctggatgggagccttgtcggagatacggattcgacccatttgggctagggaagcccgccgagtactgcatt

SEQ ID NO: 3361 - DNA, 291 bp, Glycine max
  unsure (1)..(291): unsure at all n locations; Clone ID: 700557612H1
aggattctacccgccgctcgatgggaattgcgcttcaaggcgtctcgtagggctaatccgcctcacgagggtcaccaacggcacgtgcctttggggggccgaggccccctactgctggtcggcaaacggacggcgggcgcacgcgtcgcttctagcccggattctgacttagaggcgttcagtcataatccaacgcacggtagcttcgcgccactggnctttcaaccaagcgcgatgaccaattgtgcgaatcaacggttcctctcgtataggttgaattactattgcgac

SEQ ID NO: 3362 - DNA, 294 bp, Glycine max
  Clone ID: 700557613H1
atccaccttttggggagaccaccggagatatgtacggacggagtgattcttacgaatccgatttggcgcttctggattcgattcgccgccacttgctgggagagtccgaattgatattcggagccccgaatttcggttcgggtcggagctccagtttcagcagcttggactcgtgtttgagtgatgattggggagagcttccgtttaaggaggacgattcagaagatatggtgttgtacggcgttctccgtgacgcattaatgtggggacggtcccatccctcgatgccggctc

SEQ ID NO: 3363 - DNA, 299 bp, Glycine max
  Clone ID: 700557614H1
caacaactcactcactaagctaaacaatttcatcaagcctgccatggcttcctcgtgtgcttcctctgccattgcagctgttgccatctccacaccaagttcccagaagaatggatcactcttgggaagcacaaaagcttcttttcttagtgggaggaaactgaaggtgaacagttttacagcaccagttggagcacgatccagcactacagtgtgtgcagttgctgagcctgataggcctctgtggttcccaggcagcacccctcctccatggctagatggcagtttgccaggagatt

SEQ ID NO: 3364 - DNA, 297 bp, Glycine max
  unsure (1)..(297): unsure at all n locations; Clone ID: 700557615H1
cgcaaactgtcatcttgtcattcaccgagaaagtcgtactgattcctcttcatctttcgttaaagcgagtacttttcgttcttgatctgttggttacgatgtcgtattcaaggagatctaggtattctccttctccttctccttctccatacaagcgatacggnaggtctgnntccaggtctctctcaatatcnagatccagaagccgttcaaggagtttatcnagagatgcagannatccaggagacaattgtatgtgacaggattgtctcctangnnacnancnngaactggagg

SEQ ID NO: 3365 - DNA, 301 bp, Glycine max
  unsure (1)..(301): unsure at all n locations; Clone ID: 700557616H1
ctgctaagcagcattgtggcaagtggacttgccagaaggtgcattgtgcaagtgtcttatgccattggtgtgcctgagcctttgtctgtgtttgttgacacctatggcactgggaagatccatgataaggagattctcaacattgtgaaggaaaactttgatttcaggcctggtatgatctccatcaaccttgatctcaagaggggtggaaataacaggtttttgaagactgctgcctatggacactttggaagagaagaccctgacttcacatgggaagtggtcaaacccctcaantggg

SEQ ID NO: 3366 - DNA, 277 bp, Glycine max
  unsure (1)..(277): unsure at all n locations; Clone ID: 700557617H1
caatattgtaaaactcaaaatctagtttcatactttttttcttcttcttgaaatggctctccaggctgcttctcttgttcctgcttctttctcggttcttaaagagggaaagagtggtgtgtctctcaaggactccaccttgttcggtctttcattttcagaacctatcaaagctaacttcagctcttctgcattgaggtncaagagggaattcgaacaaaagctctntgctgtgagggccgaaacagtggctacagcctctccagcagttaccaag

SEQ ID NO: 3367 - DNA, 184 bp, Glycine max
  Clone ID: 700557618H1
agaaggtgttcctaccatcattttggtctgggctattctcctgtcttcaatcttaaccctactttgggtgagaatcaacccattcttggccaaaagtgatgtggtgttggaaatttgtggattgaattgtgactaaaggtaacaaaaaatggaagggcatgccatggtttgacgttttacactg

SEQ ID NO: 3368 - DNA, 237 bp, Glycine max
  unsure (1)..(237): unsure at all n locations; Clone ID: 700557619H1
ctgcaacnatggctactaccttatgttacaattctcttaacccttcaacaaccgttttctcaagaacccatttctcagttcccttgaattcagagcttccactggatgcttcaccttttgttgttggctataactgtggtgtaggatgcagaacaaggaagcaaaggaagaaagtgatgcatgtgaagtgtgcagtggtggaggctccaccaggtgtttcaccctcagcaaaagatg

SEQ ID NO: 3369 - DNA, 286 bp, Glycine max
  unsure (1)..(286): unsure at all n locations; Clone ID: 700557620H1
cttctcctgaatcatgcagtgcggattttggtccgaatcggtgantccccaaaatgggtaacagcagaaagaagcaccgtcgtgtgcaagactcgccgtcttcttcatcctcttcgtcctcggactccgaccactcttcnnnnnnnnnnnnnnnnnnnnnnnnnnncgagaaggagcggcgcagaaagagcgagggaaaggatgagcgaaggagtaagaagagagacaaagagcgcaaaaagaagaagaggaggctccacgattccgatgactcctactcttcgga

SEQ ID NO: 3370 - DNA, 284 bp, Glycine max
  unsure (1)..(284): unsure at all n locations; Clone ID: 700557621H1
gctgatcttaaagaacacgtgattaagcctgtgattcctgagaagtaccttgatgagaagaccattttccatttgaacccttctggcaggtttgtcattggagggccgcatggcgatgctggtctcaccggccgcaagatcatcatcgacacctatggaggatggggtgcacatggtggtggtgccttctctgggaaggatcctaccaaggttgataggagtggtgcctacattgtgaggcaagctgcaaagagcattgttgcnaatggacttgctagganggc

SEQ ID NO: 3371 - DNA, 85 bp, Glycine max
  unsure (1)..(85): unsure at all n locations; Clone ID: 700557623H1
ctcttggacngntctgtgntcccngagtacttgaccggagaagtccccggngactatggttatganccatntggtcttngcnnga

SEQ ID NO: 3372 - DNA, 287 bp, Glycine max
  unsure (1)..(287): unsure at all n locations; Clone ID: 700557626H1
angaaatcgttttatgtgagtnacagaacaacacatcatagacagacacaacattagtatctttcaactgttgctctgcttctgcacacagagaatggtgtgggtggggaaacagagatgatctatctgtgttcacagcaccactgtttccctgcctcacccttatgtacaagaacaagaataagcacacacacccgccacaacgctatagtcatcacttcgaagaacttcacaattttgttttcttggatatggggagtctgctcttgaaaccgaggatgtatctc

SEQ ID NO: 3373 - DNA, 290 bp, Glycine max
  Clone ID: 700557628H1
tggaacatcttcaagtggagatcatcactatggtatccttgaaggatggtttggtgtgcaatggtggacaggccggacatttgttgtactttttactacacttgccatatttgtacctcttgcgagctttaagcgaattgattcattgagattcacgtccgccctttcagtcgcacttgcagttgtttttctagtcattgccgtgggaattgctgttgtcaagatatttagtggaggcattgtgatgcccagactcttccctgtcacgactgatgtggcatcatctcaga

SEQ ID NO: 3374 - DNA, 196 bp, Glycine max
  unsure (1)..(196): unsure at all n locations; Clone ID: 700557630H1
actgaggtgatgagctttgaatttgccttctcccgcccaagtgaagcccttatntttctnttncaataantccacaaaacttccaggtagcnnttctttgaagagannagatagtgacacaacngtagagagacgagtttattgctctgccgctgctcaatcatcancaccagcatggcnaggaacagctattccc

SEQ ID NO: 3375 - DNA, 297 bp, Glycine max
  unsure (1)..(297): unsure at all n locations; Clone ID: 700557631H1
cnagttttaggcttgctgtggaagcacacaacatccgagcctttaaaacncttncctgaagagtgcgttgaaccaanaaaggactacattaatggcgaacaatttagatcagactctaaaacagttaaccaacaagctttcttttatgctagtgaacgcgaagtccatcacaacgacatatttatattcggcatagataacaccgtactctctaatatcccatactatgaaaaacatggatatggggtggaggatttatgaaaccttatatgatgaatgggttacaagggcgacgca

SEQ ID NO: 3376 - DNA, 293 bp, Glycine max
  unsure (1)..(293): unsure at all n locations; Clone ID: 700557632H1
gtgaacccgaattgttcattgcatcacatgttttgcagatgcctatnacagtatacatgtatgataaagatgctggtggtttgatatcaattgctgagtatggtcnagagtacggcaaagnnaacccaattagagttctctaccatggctttggtcatnatgatgcattagagattcctagaaggaagggtcctangccaagactgtagcattcatatttaaaatgtgnaagagattaaagcttgtatnggttcccttcagtaacattcataatgtcactataggtcaggntc

SEQ ID NO: 3377 - DNA, 101 bp, Glycine max
  unsure (1)..(101): unsure at all n locations; Clone ID: 700557633H1
gcagagaaaaagcatatggtctcccgtcacagatnccaagaagtggtttncaaccgggaatccagaacctttccacagccttcaagccccntctccgtcct

SEQ ID NO: 3378 - DNA, 282 bp, Glycine max
  unsure (1)..(282): unsure at all n locations; Clone ID: 700557636H1
actcaatttttctctcaaccggcncaatttagcataagcccagcatggcnaccgcaacagcagcngccacctgcgtccttcatggggacgcgcctcctggaggcccactccggggcggggcgggtgcaggcccggttcgggtttggcaagaagaaagccgccgccccgaagaaagtttccagggggtcgggctctagctccgataggcccctgtggtatccgggcgccaaggcgcccgagtacctggatgggagccttgtcggagactacggattcgaccca

SEQ ID NO: 3379 - DNA, 285 bp, Glycine max
  unsure (1)..(285): unsure at all n locations; Clone ID: 700557637H1
aaggattctacccgccgctcgatgggaattgcgcttcaaggcgtctcgtagggctaatccgcctcacgagggtcaccaacggcacgtgcctttggggggccgaggccccctactgctggtcggcaaacggacggcgggcgcacgcgtcgcttctagcccggattctgacttagaggcgttcagtcataatccaacgcacggtagcttcgcgccactggctttancnaccaagcgcgatgaccaattgtgcgaatcaacggttcctctcgtactaggttgaattac

SEQ ID NO: 3380 - DNA, 185 bp, Glycine max
  unsure (1)..(185): unsure at all n locations; Clone ID: 700557638H1
tgnacccgnnttgtgcattgcatcncatgtnttgcagatgcctatcacagtatacatgtatgctaaagatnctggtggtttgatatcaattgctgagtatggtcnagagtacggcaaagaaaacccaattagagttctctaccatggctttggtcatatgatgcattagagnttccnagnaggaa

SEQ ID NO: 3381 - DNA, 284 bp, Glycine max
  Clone ID: 700557639H1
tgagatcatgcatatgcgacacaaatttgatgttgacacacgcttggttgagggtattgtccttgatcatggttctaggcaccctgacatgaagcgacgtgcagaaaactgctatatcttgacatgtaatgtatctttggagtatgagaagagtgaagtaaactcaggctttttctactcaagtgcggaacagagagaagctatggttgcagctgaaagacgacaggttgatgaaaaagttaaaaaaatcattgaactgaagaataaggtttgttctggtaatg

SEQ ID NO: 3382 - DNA, 281 bp, Glycine max
  unsure (1)..(281): unsure at all n locations; Clone ID: 700557640H1
gcgaagattttcacgctttgcttttgcctccaaattgatctctctctgtcacgagctttgatctgaagcgaanacttcctctgcgaacatggaaagcaagtgcgggaatggttgccggttcgcataaacggaacgagctcgttcggattcgccacgattcttctgacagcgggtctaaacccatgaagaatttgaatgggcaaatctgtcaaatatgcggtgatactggtggantaactgctacnggngaagngtttgntgnntgcaagnntgngcttccc

SEQ ID NO: 3383 - DNA, 290 bp, Glycine max
  unsure (1)..(290): unsure at all n locations; Clone ID: 700557641H1
acaagttccatggtataataaatggaatcgacccagatatatgggacccgtataatgataaattcattcctgaatcatactcatcaaaaaatgttgttgaaggaaaaagagcttccaaggnagccttgcaacaaaggcttagtttaaaaaaagctgatcttcctttagtgggaattattactcgattgactcatcagaaaggaatccatctcatcaaacatgccatatggcgcaccctagaacgtggtggacaggttgtattacttggttcagctccagatcctcgtatc

SEQ ID NO: 3384 - DNA, 288 bp, Glycine max
  unsure (1)..(288): unsure at all n locations; Clone ID: 700557642H1
catactgatttcaatgctctcacaattgttttgcagtcacaagtttctggtctccaagtggatcaaagatgggaataacangtactgcaatccatttcccatctttgatcacttggagaccagaaacttgtgatcaaagatgggaaatggattgcagtacctgttattcccaatgcatttgttatanncctgggagatcaaattcaggttcttagcaacggaagcntcaaaagtgncacatcacagggctgttaccaacaaattgagtccacgggtgtcgatggcaat

SEQ ID NO: 3385 - DNA, 288 bp, Glycine max
  unsure (1)..(288): unsure at all n locations; Clone ID: 700557644H1
cnaaaagtaggggactttggcctagcaagactgttgccaatgcttgatcgatacgttttgagcagcaaaattcagagcgcactcggctacatggcgccagagtttgcctgcaagacggtgaaaatcaccgagaaatgcgatgtatatgggtttggtgtcttggtcttggagatcgtcacagggaagaggccagtcgaatacatggaggatgatgtggtggtactatgcgacatggtgagaggggcttggaagaaggcagggtggaggagtgcatgatgagaggctcca

SEQ ID NO: 3386 - DNA, 293 bp, Glycine max
  unsure (1)..(293): unsure at all n locations; Clone ID: 700557645H1
ggctggttcaactgaggtgatggctttgaatttgccttctcccgcccaagtgaagcccttatttttctcttcaaataactccacaaaacttccaggtngcttttctttgaagagaaaagatagtgacacaacagtagagagacgagtttattgctctgccgctgctcaatcaccaccaccagcatggccaggaacagctattcccgagccttctgatttcaagacatgggatgggcaaaaacctatttctgtcttaggatctacgggttcaattggaactcagacactgagta

SEQ ID NO: 3387 - DNA, 295 bp, Glycine max
  unsure (1)..(295): unsure at all n locations; Clone ID: 700557646H1
cnattaacacacacaaacagaggctacgtacgatcanattaattaagatggcggaagtgaggnacaaacaagtggttctgagggactatgtgagtggttttcctaaggaatccgacatgaacatagttgaaggaaccacaatattgaagcttccacaaggttccaatgatgtgcttctaaaaaatctctacctttcctgtgacccttacatgagaatgctcatgaccaaggtggaaggcctcgacgtgtttggcacctatacacctggntctccattaacagggtatggagtgtc

SEQ ID NO: 3388 - DNA, 293 bp, Glycine max
  Clone ID: 700557647H1
tggcagaacctgaggaagaggaaccgcagaaggcactagtggttgctgaaaaacagcgccaatgctagaaactttgttcatccggccatttctttacacagagcacgaataagtgtatcttgcgccctcagattgggtcatttctttgcagttagattaacaataaaaatgtgcttgaagtcagccaatgttcaatatttgcaatcaaaaggcttttatagtcataatagccagccagttgtctaaatatcttgcacctatagtctatagatggggcattccttgtagctagg

SEQ ID NO: 3389 - DNA, 101 bp, Glycine max
  unsure (1)..(101): unsure at all n locations; Clone ID: 700557648H1
ctagttctagatcgcgagcngccgnncacanaaggtgcattgtgacnagtgtcttatgccattggtgtgcctannncctttggnngtgnntgttggacact

SEQ ID NO: 3390 - DNA, 285 bp, Glycine max
  Clone ID: 700557649H1
ctccaagtttccaacaaaaaaaaaacatgagaaggagccttgtgtttcaacagcaatactatgctgatgatggcacatggatggagactcatcaggctcagcaacatggctatgccttccacgaagagtcgtcttggagctctgataacaactacggccacaagcgattcccagcagccatgcacatgaacaagcttggtgcttttgctgtggactctgatctctcaatgtcaaaacagaagcataccaagttaggaggagccatgcgcatgaacaggcttgctg

SEQ ID NO: 3391 - DNA, 278 bp, Glycine max
  Clone ID: 700557650H1
caactttgaaaactcaatggctgcaacttattatttactgccaacaagtccgaaaactttctcacctttcctcagaaacccaccttccattccttcaggtcatcatgtttcactgttgggttcattattggactatccattccattgttccagcagaagaggaaacaatagtgttgaggccaattgcaatgcaaaaaagaagaacccttggttagaccctttgatgatggggaggatcctgagatggagtatggttccttgtttgcagatgggaagca

SEQ ID NO: 3392 - DNA, 184 bp, Glycine max
  unsure (1)..(184): unsure at all n locations; Clone ID: 700557651H1
cgactctctttccttccctctttttccgaatctgaatcgaaatggcttcggagactgagacgtttgcttttcaggccgagatcaaccagctcctcagtctaatcatcaacaccttctacagcaacaaggaaannnaaatcttcgngagctcatcagcaatgcctctgatgctttgaacaagatt

SEQ ID NO: 3393 - DNA, 283 bp, Glycine max
  unsure (1)..(283): unsure at all n locations; Clone ID: 700557652H1
gggtaacctttttcctccgttgaacacggtggagaaggtttctccactggccttttcacacctcaacttcccncgttcttcacttgcttctcgaacttcttcctttttgaagttattaattaatactagtttcttattcggtttctagatgtcttaggaacaggagcacagcaaaccacccctctctttcaaagcacaacctaagatgtcttgttcttgatttcttgctatctcaaattgcctctacaagcaagaagaagtggagtctgattgaacgctgaag

SEQ ID NO: 3394 - DNA, 284 bp, Glycine max
  unsure (1)..(284): unsure at all n locations; Clone ID: 700557653H1
cacaggctgcgcagtgtttgaacgttgaaggagagcgtagaggcagtggttttctttttttgatttctctttgtagaatcgaatcgagttaatttttgatcgtgtgagtgtccgatcttgaaatccacaacaacaatggtgagaggattgctcaacaagctcgtctctngctccctctcggtcgccggaaaatggcagcacaatcaactccgccgcctcaacatccacgagtaccagggtgctgaattgatgagcaaacacggagtcaacgttccgagaggcgt

SEQ ID NO: 3395 - DNA, 284 bp, Glycine max
  unsure (1)..(284): unsure at all n locations; Clone ID: 700557655H1
caccaacaattattagaggtgaagatcgtgaagctgttcacattccaaaccacaaatttacagtgaatgttgtgcggaaccttagtcaaaaaacacattggcgaatcaaaacccatctagccattagtcatttggatgtaaataagattaataacattgttgctgacatgaggnaagtcttagccaaaaatcctcaagttgagcagcagaggttgcacaggagantgtttntggacaacatanatcctgaaaatcaggnncttttgattctggtgtctgtnttg

SEQ ID NO: 3396 - DNA, 283 bp, Glycine max
  Clone ID: 700557656H1
gttgctccggcggggttcttcgacaagtacccggctctggtcaccggatttttcttcttcacgtggtacttcttgaacgtgattttcaacatcctcaacaagaagatctacaattacttcccctatccatacttcgtatcggtaatccatttattcgtgggagtggcgtactgtttggtgagctgggccgtgggccttccaaagcgtgctcctatagactccaacctactgaagttgctcatccagtggctgtgtgtcatgcattaggccatgtgaccagcaa

SEQ ID NO: 3397 - DNA, 288 bp, Glycine max
  unsure (1)..(288): unsure at all n locations; Clone ID: 700557657H1
ccacattctcaaccccgaaccctaagagcagaacgcaaatgacaaccaccttacgcgaccgtcgcaggactacggtggcgcnttactgtcatccacctcatctcgtctcacctcagggtttgtgaaatccccagtgattgctaggaatcccttgaggcaagctgtggcaatgggaaatgggaggattacatggtaattttagtacaagattaataatttgtctgattttgaaattggaanaaataactnnatgannatgatgttgtatatatgatatgatacttgaag

SEQ ID NO: 3398 - DNA, 284 bp, Glycine max
  Clone ID: 700557658H1
aatataccactcttcaattcacaaaaaaacacacaaacctcttcagttcacaaaccacacaacctcttctaatattcgttttctgatctacgcaaggttaaggttaatttgcttctatctacatggacattaacgagatcgatgttccttcattctttctctgccccatttcgttagaaatcatgaaggatccagtgacggtctcaacaggcatcacctacgaccgtgaaagcatcgaaacatggctgttctcgaagaaaaacacgacatgccccatgaccaaa

SEQ ID NO: 3399 - DNA, 278 bp, Glycine max
  unsure (1)..(278): unsure at all n locations; Clone ID: 700557659H1
ctgaaatccagaaatcagtaaganaagcagcacatggcctgcgacttactanngaggttgctatgtctattgcaagcaaggcggtaaggaagatttttattaattacataaaacgtgcacgggcagctggaaatcgtaccgagtctgcgaaagaactgaagaagatgatagcctcaacaccttagttgtaactaatttggtggaggacattaaaggggagtcaactgatatttcctctgaagaacctgtgaaagaggacttacacaaactgacgatga

SEQ ID NO: 3400 - DNA, 226 bp, Glycine max
  Clone ID: 700557660H1
tctcttcgctcttcgatcctcgtccgggggctgctccgaataccaccaccaccacgcgccgatggccacgataggaggcttacgcgactcccaaggctctcagaacagcgtccaaaccgaggccctcgctcggttcgccgtcgatgaacacaacaagaagcagaattcacttctggagttttctagggtggtgaggacacaggaacaggttgttgcgggaaccctg

SEQ ID NO: 3401 - DNA, 292 bp, Glycine max
  unsure (1)..(292): unsure at all n locations; Clone ID: 700557661H1
ttctaccgttctacatagcatctccttnaccaccattctagatatcagagaactttgcagctctcttaggtttttaaaaaacaccacgcaaacagcaagatggccacttccgacagtaacatgctactaaattatgttccagtttatgtgatgctcccactcggagttgtcaatgttgacaatgtttttgaagacccagatggccttaaagaacagctcttgcagcttcgagctgcgggtgttgacggggttatggttgatgtgtggtgggggatcatagaactgaaggggc

SEQ ID NO: 3402 - DNA, 295 bp, Glycine max
  Clone ID: 700557662H1
aacaattccccacaaggaacatacattactttgttctttttctttttctcaaatcttcttttaaagacaatcttatttgtttatttctgcacgagaattcgaaccttgaacaacataaacatgggaataaacacacgtacactagaaatcaccgttatctccggcgaaaacctccgcgtaacggaggacgcgtacgtcgtcgttcgggcggagtccttaaactgctgcaccacgagaaccgccaaggacgacggcaccaaactcctctcgtggaacgagaagttcctcttggaca

SEQ ID NO: 3403 - DNA, 287 bp, Glycine max
  unsure (1)..(287): unsure at all n locations; Clone ID: 700557663H1
caagcattggtagctgttggatatgtagaaaaataaaccgattgcaaggnatattcattttgaacatgatcaacaggtaacgaggttgggtttctcactttgaaagttgcttcctgaaataaaatgatgtgttgtggctattaaaaacagtgtgcaagattttgggggctatcgaggtttgttctttttctcctacgtttgatttttacagcaggaaatgctcctgaaaatttgggtgcattgatgcacaagcatgagctgttggatgtggatatgtagaagataat

SEQ ID NO: 3404 - DNA, 285 bp, Glycine max
  unsure (1)..(285): unsure at all n locations; Clone ID: 700557665H1
tgagctataagctagtttatcgtgaggagaatatgaagttgtttgttttctttgttgctgcagtagttttggtagcatggccatgccatggcgcaggctaccaaaggttccctctccgaatgaaaactggctatggtgagcgttcttcggaggtaaaatgcgcaagttttaggcttgctgtggaagcacacaacatccgagcctttaaaaccattcctgaagagtgcgntgaaccaacaaaggactacattaatggcgaacaatttagatcagactctaaaacag

SEQ ID NO: 3405 - DNA, 286 bp, Glycine max
  unsure (1)..(286): unsure at all n locations; Clone ID: 700557667H1
cacgctcttctctctagagctgctgcgttgctaaaacgcaccggtttgttcntgttnncgttcaaaagaaaactgacacaagtgaggcttggtgcataaacagcaatggcagaaaaaccccaaccggttcgggttctctactgcggcgtgtgcagtttgccccccgaatactgcgaattcggatccgatttcgagaaatgcaaaccctggttgatccaaaacgtccctgacctataccctgatcttctcaaagaagagaaggaagctgataaagttgctgacaaac

SEQ ID NO: 3406 - DNA, 269 bp, Glycine max
  Clone ID: 700557668H1
ggagattaacgctcttgcacgggaagcacttattaatgctgatggcacaattgagagctcatttgcaccaggaaagtatgccttagagattagctccgctgcttatgctctcgaatggcggtttgacaagcaggcactaccagcagatctaattagaaggggaattgctgttgaagatccattttctccacatggcttaaagcttaccattcaagactatccttttgccaatgatggactccttctgtgggatgctataaagctatggg

SEQ ID NO: 3407 - DNA, 286 bp, Glycine max
  Clone ID: 700557673H1
gcagaaagcaagctcatcctagagttttaaaaatggcagcagcctcctccatggctctctcttccccatccttggctggcaaggccgtgaagctgggcccatcagcccccgaagtcgggagggtcagcatgaggaagaccgtcaccaagcaggcctcctccggaagcccatggtacggcccagaccgcgtcaagtacttgggcccattctctggcgagcccccgtcctacctcactggcgagttcccaggtgactacggctgggacactgctgggtttcggccgac

SEQ ID NO: 3408 - DNA, 284 bp, Glycine max
  Clone ID: 700557674H1
tgctatctgcttcctcgtagtacttcattgagagagacatggacactgtactaagtactacgctgctactcatgttggcatgctccatcgtgcatgttcttcgttcactacaagcaagaatgagaagaaaatcaaactacaatcttccaccaggaccctctcttctcaccatcattagaaactctaaacaactctataaaaagccacagcagacaatggccaagcttgccaaaacctatggccccataatgcgtttcaccataggccatcaaccaccatagtaa

SEQ ID NO: 3409 - DNA, 189 bp, Glycine max
  unsure (1)..(189): unsure at all n locations; Clone ID: 700557675H1
cgngtcgaggagaatcaatggaagacggtgagattncancagggatcaattggcggtgtagaggaagaggagcaatctccagaaccgcacaagtcggaggaatctccctacgaaatgttgcgcaacagcaaggcttccgtngagagcatcgtcgccgatatgctctccattaaanaagagggtaaaccc

SEQ ID NO: 3410 - DNA, 286 bp, Glycine max
  Clone ID: 700557676H1
cctgtcagaaaacatatattggtaaccaaacgcatctcgatctcaccgctacaggtggagctaagagctatggtgaatcgatgccagcttccacagagcttttcagggtgccattgatatcatttctctatgagaggggctggcgtcaaaccttttctgtgtggggtggttttcctggtcctgagaaagagtttgaattgatgaagggtttcttaaagccaatattgggaggaaatatcatgatgctagttgtgcaagtggattatttcaagattatttgcaaaaa

SEQ ID NO: 3411 - DNA, 102 bp, Glycine max
  unsure (1)..(102): unsure at all n locations; Clone ID: 700557679H1
gcaagttttaggcttgctgttgaagcacacaacatcngagcctttgaanccattcctaaagagtgcgttganccaacnaaggactacattaatggcgaacag

SEQ ID NO: 3412 - DNA, 190 bp, Glycine max
  unsure (1)..(190): unsure at all n locations; Clone ID: 700557681H1
tggngtncttntggaatctgcatctgtgcaagattttgatgaaagannnatgttctacatgtatctttctcctggagatattcagagtcacaaggtattcanaaaggacatcatattcattattgacatcagtggtagtatgcggggaaagctaattgangacacnaagaatgcactattgactgctctc

SEQ ID NO: 3413 - DNA, 189 bp, Glycine max
  unsure (1)..(189): unsure at all n locations; Clone ID: 700557682H1
tgaggaagatctgaagaagaaggtagcagaatggttgaaagggaagagttatctggtagtgcttgatgacatctggganaccaaagtatgggatgaggttaaaggagcctttccagatgaccacataggtagtagaattctcataacaagtcgcaacaaagaggtggcacactatgctggaactggcgt

SEQ ID NO: 3414 - DNA, 97 bp, Glycine max
  unsure (1)..(97): unsure at all n locations; Clone ID: 700557683H1
gaatgacaaagcccttgtgcagacatttngcagcatgtgagaccatgggatcagccacaactatatgtagtgacaagactgggacactaacaaccag

SEQ ID NO: 3415 - DNA, 191 bp, Glycine max
  unsure (1)..(191): unsure at all n locations; Clone ID: 700557684H1
tttnnctntacttttcaagtttagttccaccacatctatngcancangatgggngtatgagtatattttgggaggcattanagcnctagcttggtngcttgnntntgtnatatatggnnctgtatcaaagaggaaggccannagtccagtacatgcagaaantaatggtggtagtattataaggacatcac

SEQ ID NO: 3416 - DNA, 100 bp, Glycine max
  unsure (1)..(100): unsure at all n locations; Clone ID: 700557686H1
atcacanncgcataaggccacttattcagctccaaatccaatgccttcaactggnatcaantatnttgtcacgcaattccatagtctatantcacctgtg

SEQ ID NO: 3417 - DNA, 283 bp, Glycine max
  Clone ID: 700557688H1
ttgctccggcggggttcttcgacaagtacccggctctggtcaccggatttttcttcttcacgtggtacttcttgaacgtgattttcaacatcctcaacaagaagatctacaattacttcccctatccatacttcgtatcggtaatccatttattcgtgggagtggcgtactgtttggtgagctgggccgtgggccttccaaagcgtgctcctatagactccaacctactgaagttgctcatccagtggctgtgtgtcatgcattaggccatgtgaccagcaat

SEQ ID NO: 3418 - DNA, 284 bp, Glycine max
  Clone ID: 700557691H1
tagaattgtagaagcttcacttcactctcatcaactcagagttgcatagaaatttgtctctatttttgttattttctctcttctttgtggacttttagcaactatattgtttccaatgtccaagatgttgggagtgtttgtgggacttttgttggtggggttggctgcctctgccaagtttgatgaactcttccagcccagttgggctatggaccatttcatccatgaaggagaactcctcaaactcaaacttgataactattctggtgctggatttggatcta

SEQ ID NO: 3419 - DNA, 289 bp, Glycine max
  unsure (1)..(289): unsure at all n locations; Clone ID: 700557692H1
gatggcacaacttatcgaaagggatgtaagagacccacgagtgagattggaggaacaccactgaacttaagcgcgtgttcttccattcaggcaagtccacaatcctcgtcatacccgagtcctgtaccatcctaccatgctagcccaacctcttcctcgttcccaagccccacgcgcattgacggaaaccacccttcttcctttctcatcccattcatccgcaacataacttccatccccgccaacctccctcctctcaggatatccaacagcgcccccgtnaccccac

SEQ ID NO: 3420 - DNA, 189 bp, Glycine max
  unsure (1)..(189): unsure at all n locations; Clone ID: 700557694H1
ccattcgtattgtcgcagagaaagaaaaccctagctcaccgtttcaagatgcaaatcttcgttaagacnctcactggtaagaccatcactctcgaagtcgagagttcagatacnatagacaatgtaaaggccaaaattcaagacaaggaagggatcccaccagatcagcaacggctcatttttgctggc

SEQ ID NO: 3421 - DNA, 176 bp, Glycine max
  unsure (1)..(176): unsure at all n locations; Clone ID: 700557695H1
tagcttcactctcaagccgactctactcactctagtggacngctttaactcttcataattccatttcattgcacattngcgcccttctcagttctctcaatcanatccatggcnacaaacgcnnactgcgaaatgcccctcacacaccancctcattggttctctccaaaatccgg

SEQ ID NO: 3422 - DNA, 209 bp, Glycine max
  Clone ID: 700557701H1
cgtcccctgagaataatgtgaacggcgtattcaaaatctctccattctttttgtttattttcctgcttctcaagctaatgtatatttaaaggagtgacgggttatgttgtcaggatgcaattctacaatctataaataatcagatagataatgtcaagcccttgttagctttggcgaaatattgatttggggatggaatatgaaatcga

SEQ ID NO: 3423 - DNA, 283 bp, Glycine max
  unsure (1)..(283): unsure at all n locations; Clone ID: 700557702H1
tccatccttatcgctttgattagttgatttttaaatttttgacgacctcaatcataagangaatcaattcttgtagctttgattcgttttcttttaattagatttgcaaacactactgaaaccgaaaccctaaacccttgtgaataagacgaatttgttcntcctttgattagataagaaagagttagatttagattcagttcgtttacgcttntatntgttgtcttctaattagatttgggagtataagtgaaaccctaggtcttatgggaagttagtgaat

SEQ ID NO: 3424 - DNA, 282 bp, Glycine max
  unsure (1)..(282): unsure at all n locations; Clone ID: 700557704H1
tgctgaaggagaaaagagtgcaaatttgagaagtagaagagggaggtcttgttcaattttaccgcatgctagtgctaagatggcatgtgatcaaacacacagattgntctctactaacttagatgaagtgagtcaaggtgaaagtacacacaatagaggagtagctaatgattctcctcgcatccttaatgttcatgatgtgtatgaagttccacaaactagtgaaaatcatgaagtcagtgaacatgggggaaaaaggtttgagaaatggagttctgatgc

SEQ ID NO: 3425 - DNA, 286 bp, Glycine max
  unsure (1)..(286): unsure at all n locations; Clone ID: 700557705H1
anattaaggataaatggagctctgccacagactctagaaagcagagaaaacgatgatgggcttacatggttgtactctcaaactcgcttcagttcccaatttctcttctccaactttccttttcaaaactccaaccctccgttttcagaaatctccattgtcacgccccatcagagctctatcttcctccgccctcgtccaaacatctantaccaaggccactgaagaccaaggtgtgaagcctcaatggaaggccacgatagacttcaagtggataaaggataac

SEQ ID NO: 3426 - DNA, 284 bp, Glycine max
  unsure (1)..(284): unsure at all n locations; Clone ID: 700557706H1
ggcaagagtggtggcactccaacagaaccaactatctttctctaccttagcttcctctctttctgacttcagtggaaccagacttcaaactcaacttcagttcaagagaaagcaatgccatccaaaagggtctttctacgtctccgcatcgagcaccaagaaaatcctaataatgggaggcaccaggtttattggtgtgtttttgtctaggctccttgtcaaagagggtcaccaggtgactttattcacaagaggtaaagcgcctgtcactcaanagttgccag

SEQ ID NO: 3427 - DNA, 272 bp, Glycine max
  unsure (1)..(272): unsure at all n locations; Clone ID: 700557708H1
cnactgcttcagctaatgacatggagaagtccgcaccatcactggccagcaaaagcaacaagatatanaccttaatttggatcttcctgaagagtgaaatcaatcattttttccccaaaagnaataatgcnagtgtaaagatgagttttagttcagtgaattgtaggcctntagcactnaanaagtgaggaaagcacggttaagaaacntttagttgttttcattttctgtttccactttngttacaagaatattggtgtgtgtttacttna

SEQ ID NO: 3428 - DNA, 281 bp, Glycine max
  unsure (1)..(281): unsure at all n locations; Clone ID: 700557709H1
aaactattgtcctgtctcaatcttatgtacgcactcttgctggattagctcttcgtgtcattcgtgatcctgctccaggtggttctgacttagtagataattccaggagggcatatacagcttatgctgtggttgagatgctccggtatttaatacttgtgntgccagatacttttgctgctctggattgctttcctttaccatcctctgtaatttcacatacaatgaatgatgggagttttgtactaaaatcaactgaagctgcagggaagatatattat

SEQ ID NO: 3429 - DNA, 283 bp, Glycine max
  unsure (1)..(283): unsure at all n locations; Clone ID: 700557710H1
cactcactagcttcttctctgttctcaccaatggcatcaacantatcagcaatggccatgatcaacgccaaatgcgtcaacccaaagttccccaatcccaccaagctcgcaccatcaaaaccctcccttcagatcaaccttccaaagggcctcatagcctcacccgaaagcactaaactttcccccgcgacagcaatcgcaggagcaatattcacaaccctcggaacctgcgacgccgcattcgctgttcaacaaatagccgacatagcagaaggcgacaacc

SEQ ID NO: 3430 - DNA, 278 bp, Glycine max
  unsure (1)..(278): unsure at all n locations; Clone ID: 700557711H1
ctgaaacatggcttcggctactctctctgtagccaaaccagcccttcaggcaaatgggaaaggctctctgaattctctggcctccgaagctcatcaggcttccttaccttttctagaaaatcttcagaggatttccattctgtcattgccttccagacctatgcagttggaagcagtggaggatacaagaagggtgtgncagaagcaaaactgaaggttgccataaacgggtttggaaggattggaagganttcttgaggtgctggcaggtcgcaaag

SEQ ID NO: 3431 - DNA, 280 bp, Glycine max
  unsure (1)..(280): unsure at all n locations; Clone ID: 700557712H1
tcgctcattcgntctcttcacaatttccagatctgaaatcaanatcgaaatcgaaaccgaagagagagaaaacnnnnnnnnnnnnnnnnnnnnnnnnnnnntgagggaaccatcgtcggtgggattcgaangcaacggcgtcgtttcttcgccgccgcaagctctcatcgagagactgaaagactacggccaagaagacgttttcgccctctggtacgagtctcccccgaggaacgcgagtttctcgtcaaggacntgagagtttagatctttcgagaat

SEQ ID NO: 3432 - DNA, 281 bp, Glycine max
  unsure (1)..(281): unsure at all n locations; Clone ID: 700557713H1
ttgaatttgccttctcccgcccaagtgaagcccttatttttctcttcaaataactccacaaaacttccaggtngcttttctttgaagagaaaagatagtgacacaacagtagaganacgagtttattgctctgccgctgctcaatcaccaccaccagcatggccaggaacagctattcccgagcctctgatttcaagacatgggatgggcaaaaacctatttctgtcttaggatctacgggttcaattggaactcagacactgagtatagtggctgagttc

SEQ ID NO: 3433 - DNA, 283 bp, Glycine max
  unsure (1)..(283): unsure at all n locations; Clone ID: 700557714H1
cacagtcacatacacatactactactcgtttcatttgcctcttgtagtagccaatagccatggttttccaaacaagcaataatccccatttcgtattgtttcccctaatggctcaaggccacatcatccccancatggacattgcaagactattggcgcggcgtggtgtgattgttaccatattcactaccccaaagaatgcatcacgtttcaattctgttctttctcgtgctgtttcatcaggcctccaaatccggctagttcaactccactttccatccaa

SEQ ID NO: 3434 - DNA, 286 bp, Glycine max
  unsure (1)..(286): unsure at all n locations; Clone ID: 700557716H1
ancttcttcaggcatgttccctcaatctcacggtggacatatgaaccaaggatctatggcacttgttccttcacacacagctccccaagcttcaacaggactgagtgcaaactatttgtcttctcaatcccccattgccattgatcaagcatcacagtttaacagtgggagcttgttgggacagtcatttaaccatcaaccacttggtcaaggagtacatgcttcacagagtgctgtttctcaaccgcccaaggacaagtttgagacaaaatcgacagtttgggca

SEQ ID NO: 3435 - DNA, 285 bp, Glycine max
  unsure (1)..(285): unsure at all n locations; Clone ID: 700557718H1
ttanccttattgtcgtntgtgtngaatgtatatgctgttacctgaatttattatttcttgcagcatgaaagccacgatagacagttcaagttcaagcattatgatacatcagaccccaaaataccaacaacactactcagctgagcagttattatatcgtactttcacatgaaagtgtcataaaggcagataaaagcatatacattcaacacacacgaccataaggctcaagcacaaggcaatagtatgacttaaacggtgacacatttcagcaattattcttaa

SEQ ID NO: 3436 - DNA, 276 bp, Glycine max
  Clone ID: 700557719H1
atttgaggacaactctgcctctagccagatattttggctattgaaagaaagtgagctaactcctagtaatgccaatatattggatggtcgatatgccgtctttggctatgtaacagaaaatgaggataacttggcagatctcaaagttggtgatgtcatagaatccattaaagtagtttctggcctggataatttggtgaatcccacctacaagattgctggctagttctgtgctttgctatcaaatactgcagagtgtttatttggcacttgctt

SEQ ID NO: 3437 - DNA, 278 bp, Glycine max
  Clone ID: 700557720H1
ctgatcactgcgtgcgttcttccttggctaactctgcgggaattcagactattgttttggtacctactgatttgggagtcgtggagttgggttctgtcagaatgttacccgagagttttgaactcttgcaggctgttaaatctgtgttctccacgccgattcccaaggttttggtgaacacaattcgcaatcagacacattttagagagaaacttgctgttagaaaaatggaggataataggcctggaacaacaacaacgttagttttccgaatgtgc

SEQ ID NO: 3438 - DNA, 280 bp, Glycine max
  Clone ID: 700557721H1
ggaagattgttgacgtgctgcttgagcaaaacattgttcctggtattaaagtcgacaagggtttggtgccccttgcaggttccaacgacgagtcatggtgccaaggtttggatggtctagcctctcgctcagctgcatactacgagcaaggtgcccgtttcgccaaatggcgtactgttgtgagcatccccaacggtccctctgctctggcagttaaggaagcagcctggggtctggctcgctatgctgcaattgctcaggacaatgggttggtcccaat

SEQ ID NO: 3439 - DNA, 282 bp, Glycine max
  unsure (1)..(282): unsure at all n locations; Clone ID: 700557722H1
gcaaagctactgcttactgattacattgattgtacataagtattctactaccatgtatactcancgtttgtnnatatgaatcagaataggatattgcatggccaagctcaaggaaannaaagactcgattccaagtgatgacctgttaacaaaaganaagttcaaaagatacaagaggcaaaaggagttcatgtgaaggcaattcttatctaataaggttgtagttcgacttgtgcaagcccaaggatatgattatatgaagactcaaaataaagtgtagaa

SEQ ID NO: 3440 - DNA, 214 bp, Glycine max
  Clone ID: 700557724H1
acttcatgtgcgtggttttatgttgcatgtgttgttattattattaacagctatgtgatcttcgtgtgatgtggttttcatccctacccgtgttatgtttgtgtattaaataaaagtatgaagcgccccaccaccaagtaatatgggttatatacgtgttccatatataccaagagagtggtgcgtggttgtgaagaatctatatattgctatt

SEQ ID NO: 3441 - DNA, 276 bp, Glycine max
  unsure (1)..(276): unsure at all n locations; Clone ID: 700557726H1
cataaagtacaaaatagggattaataattcatattaatataataaatttcgatcgatttatcnaatagatatctatttgattatttcaaaaatattattattgtaaattttagtaaagtaactaataataataattaggaattcatatttctaaattaatgtctaattctacattaanagaatggttactatagccatcgattcgttttagttctatcaattctatatgaataaatggattgtttatttcaacaanancangaaaatgaanatttc

SEQ ID NO: 3442 - DNA, 136 bp, Glycine max
  unsure (1)..(136): unsure at all n locations; Clone ID: 700557727H1
gnatgagtttggtagcgggctcatacgagaaattcatctggggcttcaccctccgctcccaatcccaaaccctaacccctctgttttcttatncttcccacctctcctccatcaaatccgtcgccatctccggccc

SEQ ID NO: 3443 - DNA, 279 bp, Glycine max
  Clone ID: 700557728H1
ccggtggccgctatcaggatcatggacgcagtgggactctctgcaacattcaccagattgaaaaaagaaggaaaagtggctttcatcccatatatcactgctggtgatcctgacctttcaaccactgcagaagcactgaaattgcttgattcatgcgggtctgacataattgagctaggcattccatactctgatccttggcagatggtcctgttatccaggctgctgctacaagatctttagcaaaggggaccaattttaatgtgattattgatatgt

SEQ ID NO: 3444 - DNA, 278 bp, Glycine max
  unsure (1)..(278): unsure at all n locations; Clone ID: 700557729H1
gaaganagacatgttggatttgtctgatggtgatagtgatagtgatagttctgatcgtaagangatgagagagtttgcgttggatatgctgagctgggttacaggtgccgcaaagaatccctgtgatcncgaagttggttcaatacctgaaaaggcaaagtggaagtcttacagtaatcaggaggtgtggaaacaggtgctgttgtttcgagaatcagcgtttctcaaaagaggttctgatccaagcagtgaacaacgtagctggcagagtcagaaga

SEQ ID NO: 3445 - DNA, 283 bp, Glycine max
  unsure (1)..(283): unsure at all n locations; Clone ID: 700557732H1
taggattcgagtgttcccttagttgtcaaatgggctgatactgaaaaggaaaggcaagctcgtagantccagaaagcacagtcccaagcttctaatgtaccacatactgattctcagcacctgtcaatgtttggagccttgcctatgagttatgttcctccgtataatggatatgcttatcaggctccgggaggttatggcctcatgccataccgcatgccaccaatgcagagtcaacatggttaccataatgtgatgcctcacatgaatcaagtaaatgcat

SEQ ID NO: 3446 - DNA, 283 bp, Glycine max
  unsure (1)..(283): unsure at all n locations; Clone ID: 700557733H1
angnactggtatgaaggtttctataagnccatcttggcccgtccatgattcagcagatgcagcatgcttgcaatgaatgcaagggtactggagaaaccatcaacgacaganatcgctgcccacagtgcaagggagaaaaggttgtgcaggagaaaaaagtccttgaagttattgtggaaaagggaatgcagaacgggcagaagattacattccctggcgaantgntgaagcgccagacacaattactggggatattgtctttgtccttcagcagaaggaacat

SEQ ID NO: 3447 - DNA, 279 bp, Glycine max
  Clone ID: 700557735H1
gtaatggcagcgtcactacaagcagcagctactttcatgcaacccaccaagttgagcaggagcaacactttgcagcaaaagtctactcagtccatttccaaggcttttggtttggaacctgttggagctaaaaaggtcacatgctcccttcaggctgatcttaaggacttggctcacaagtgtgttgatgctaccaaaattgcaggattcgcccttgccacctctgccctcgttgtctctggggcaagtgctgaaggtgttccaaagaggctaaccttc

SEQ ID NO: 3448 - DNA, 280 bp, Glycine max
  unsure (1)..(280): unsure at all n locations; Clone ID: 700557736H1
cttcgctctcgtcgccgactttctatgggcctctacctcttccacttcttcccacntccaccaaaccctccgcatttgtngttccctccaaccacaataagaaganatatgagaatgccactgcttctggaagattccttgcngcngcttanncngatttggatgcaccgcanctcaagtggcaaaagatggctcctgctcccgtccctcgccttgacggagccgccattcagattcgggatctcctctttgttttcgccggctacggcaccatcgattt

SEQ ID NO: 3449 - DNA, 279 bp, Glycine max
  Clone ID: 700557738H1
taataaagtgttagtgtctttgcaacagaagttcccttctgtatctaagtccttattgaagaataaagtgcgtgaagtatctgactatgttgataaccgcttgcaggtgaagaaagaagttctggataagcttggctcggcagttaaacctgaaaaaagcagtgggggaccaaggagcattgctgcatttttttcaaaaaggtgctgcccccgactggggaaggttcgaaacctggtgaaacttcaccactgccacccctgaaatcatcttctgccatt

SEQ ID NO: 3450 - DNA, 277 bp, Glycine max
  Clone ID: 700557739H1
atttttcccatcaaagttacttacaacttctcaaatttttctaattttcttgctccctttcttttctggtgtgtgcacttcgtcactttttgtgccattcaaaggtgcagcataagaagtaagaggaagttgcctagtgtttgagatgtctggtgttcttctttgggtgagttgtggacccaaggagaaccccatctccattgttggtcttgctggaagaggtggcagaagccagaggaggtttggactgtgcaatgggatcagttttgcaagcttt

SEQ ID NO: 3451 - DNA, 280 bp, Glycine max
  Clone ID: 700557740H1
ccgtggccttgaaagctgtcatagagcttcgtatagcggacatactagaccgttatggtaaaccactatccttgtcgcaaattgtggagaacatagaagacgcaccctccccagatgcctctcttctccagagagtcctgagagtgatggtgcgcagaaagatcttcagtgcacaagaatcagagacaggagaaccctcttcggcttgacacgagcctcgaagtggatccttcgcgacacgaaaatgaccctagcacccatgttgctgctggagaaccac

SEQ ID NO: 3452 - DNA, 270 bp, Glycine max
  unsure (1)..(270): unsure at all n locations; Clone ID: 700557741H1
cgaagatcgagatatctatttagatctcagaaaaacagtgtttcatttcaanttcattcagtcttattattattagggnttggcgattcagagagaaagagaaatgggagaacgaaaaggaatcccaattgctctggggctcttggcgatgctnctcttcttcattgcttcttcctcttcctctcacctcgttcgtgcttccgatgacgccgacgacgcgatcttctacgagtcattcgacgaggattttgacggacggtggattgtgtc

SEQ ID NO: 3453 - DNA, 275 bp, Glycine max
  Clone ID: 700557742H1
atgaggagcttcatgcaagctgggaccagccaactgggtgcattcttttccaagatgttgaacactctaggctgcaggcttggcattccagttgacagagaaattatctatccttgcagagagtaatgaaagagcaacagaggcaaggataggtggtggtggattggatctgcctctaaggcgcagagatggccaggactatgccgctgccgctgctggtagtggaacagcctcgtcagtggtagatggcaagacctgtccctttctcagccaag

SEQ ID NO: 3454 - DNA, 279 bp, Glycine max
  unsure (1)..(279): unsure at all n locations; Clone ID: 700557744H1
ctcagaagccatggtcgtaaatctctctccctctccctctccaactttacattccagttccataatcagattgggcaaattcaaagtcacccatttcagaaccatggttganactcaaaacccacttcccaaaaccactcctttccccaacaagtgtgaacttcacttgcaacaagaatcaatttttgcacggtaaaaacaggaacaggttggatttcaggacttggtctattgctggttttgattatggaaactttgaagggcctcagtctgtgcttg

SEQ ID NO: 3455 - DNA, 276 bp, Glycine max
  unsure (1)..(276): unsure at all n locations; Clone ID: 700557745H1
tgctcgaggagaganananaaggatgctgaagagagagcaaggcaagttccggcnganccgccggaggagtggcggtgacaccggcgaagagaggccgtcccttcggcagcngtaacaacagtgcctccgccgccgcttccgcccgcggattcggcggcttccgtcaaactccttggtcttcccttcacgttcacaactctttgccgatcagaacaataaaagaattgtcttggctcttcaaagtggtctgaagantagtgactgggcgttgaata

SEQ ID NO: 3456 - DNA, 279 bp, Glycine max
  unsure (1)..(279): unsure at all n locations; Clone ID: 700557746H1
ataatctcaagttcaaccttgttctcggtaaccctatgttcaagcctcatggtgttcctcgccaccctctacttcatgacccgtccaaggggggtgtacttagtagattttgcatgctacaagcctgacgtggattgcacgtgcacgcgggagattttcgtggagaggtctggtctcacaggctcattctcggaggagaacttgtcctttcagaagaagatccttgagaggtctggtttggngcagaagacgtatcttccgcccgcaatcttgagtttg

SEQ ID NO: 3457 - DNA, 277 bp, Glycine max
  unsure (1)..(277): unsure at all n locations; Clone ID: 700557747H1
tgctcgaggatctattcaaccagtttgcaaaaacaaattttgatgagatagctcgaaacttacaaatttggtttaccaagttgttgtcttcancttctgagttcatttcagatgttagaggagcacacaatttggccaagttgcaatattataacttgacccattcagcacgattactccatggtggatcagtaccnatatttggtcgtggtgaaaatgantaggtgagactcacgtaccagtatgggacgctgatgagagtgatgctgcctcagat

SEQ ID NO: 3458 - DNA, 275 bp, Glycine max
  unsure (1)..(275): unsure at all n locations; Clone ID: 700557749H1
aactgcttttctgaaggtttgtggcagcatgaatggtactaaccaagttgttgattctcaactttgacctctatcttattgttgtatatattgctcatgttaactgactgatttgtttatatattgtttacttataatttcatttctattgttgtgtatattnatcattctatttgaagatctgtggtgctggaaaagtaaggcactggctaattttgttgttcctgagattgaacactanataagtttcacctttagttattacaatattattg

SEQ ID NO: 3459 - DNA, 277 bp, Glycine max
  unsure (1)..(277): unsure at all n locations; Clone ID: 700557750H1
tcaatggctgcaactctcactgctgtaagaattcccactttccaccaacgccatctcaaacaacacttcacggcaccctcttcctcttccttacgcctcctcaatctcgcaaagatggaaggaagtgagatcagtgagcaagtagtaggggaggatttgggagcaaagaagaaagtttttgtagctggagccactggtagcactggcaaaagaatcgttgagcagttactggcaaagggttttgctgttaangctggggttagagacatcgacaagg

SEQ ID NO: 3460 - DNA, 276 bp, Glycine max
  Clone ID: 700557751H1
attgggaattgcctgtagaagtgatgacgataaaatggcagaatacattgattcacttaatcatgaagaaacaaggctagcagttgtctgtgaaagggcctttcttcagactttggatgggtcttgccgcactcctattgcagggtatgcttgtagaaacgaggatggcaattgtttgtttagaggattagttgcttcccctgatggaaccagagtgctagagacatccagggttggtccatatgctgttgaagatatgattgagatgggtaagga

SEQ ID NO: 3461 - DNA, 276 bp, Glycine max
  unsure (1)..(276): unsure at all n locations; Clone ID: 700557752H1
tccangcgctcgtgcgcttttctatccaaccctgttttacaatgtcgttaggaataagattcaggccgagtttcgatggtgggataaggttgatgagttcatattgttaggtgctgttccatttcctattgatgttccccgcttaaaggagcttggtgtccgtggggtcatcacattgaatgantcatatgagactttggttccaacgacattatattatgctcatggaattgatcatctggtgattcctactagagattactgttttgctccttc

SEQ ID NO: 3462 - DNA, 255 bp, Glycine max
  unsure (1)..(255): unsure at all n locations; Clone ID: 700557753H1
caaagagaagcattagcactaggntcagcaacaactagtctcagctgaaatggcctcttcagtgatggcatctgtggccctcaaacctgcccctttcactgttgagaagtcctcagtgagaggccttccctctctctcaaggaactcttcttcattcagagttgtggccagtggcaagaagatcaagactgacaaaccttatggaattaatggtggcatggctttgagggatggaactgatgcatctggcaggaa

SEQ ID NO: 3463 - DNA, 277 bp, Glycine max
  unsure (1)..(277): unsure at all n locations; Clone ID: 700557754H1
ctaanttaacccttacctcactatcttcatttcaccatgggttccacaaaattaaatttaggctctttttcactacaacctggtatntctatgtggcaccgtgcttcaagaagttgcaacaagcgcgttagagcatngtgtgatattagtggagnttnttctanaatttgtgtccatggagaaaaattctcttgattatagtcctttgctttctcctcgtggtgatgaaaatggaagtgagacaacngcatctcctcttgtgtcagctactaaangg

SEQ ID NO: 3464 - DNA, 276 bp, Glycine max
  unsure (1)..(276): unsure at all n locations; Clone ID: 700557755H1
tgctcgaggagaactctttcattcatcaccantatncttcanttctcattcntttttcnttnacttttncaagtntagttcnaccaatntattggagntcatgggttatgagtatctnttgggagggnttntagcttctagcttggtgcttgtgtttgttgtatatggntctgtctcaaagaagatgaccaaaggttcagtagtacatgcagaaagtaatggtggtagtattatacggacatcatcagagaatagaaaccaccatcaagaagtctc

SEQ ID NO: 3465 - DNA, 278 bp, Glycine max
  unsure (1)..(278): unsure at all n locations; Clone ID: 700557756H1
caattgaagttaaaagccttagccttccctacaactccaaacanaaagacatcatcatccatggctgcctccgtctccactgtgcggagctgtcaacagagctcttttgaacctgaatggttctggagctggagcttcagctcccagttcagccttctttgggaccagcttgaagaaggttattgcctcaagggtccccaacagcaaggtttccggtggaagcttcaagattgttgctgtagaagagaagaaagagattgaagagacccagcagaccg

SEQ ID NO: 3466 - DNA, 276 bp, Glycine max
  unsure (1)..(276): unsure at all n locations; Clone ID: 700557758H1
anattgctttcgttcattagtatttagtttttcacaagctagggaagacatgggagaagtggctgatgaaggtcaatatttcagatcagaaatagctctattgaattactcggatgcaatcttcaaacccccactttcttctctgttgatacacattgatccactcataatacccaatggccacacttgttctgcatcagaatctgatccatcacccacttctcagcaccatcagcaggagcagcatcccaaagatgcctggcttccaatcactga

SEQ ID NO: 3467 - DNA, 271 bp, Glycine max
  unsure (1)..(271): unsure at all n locations; Clone ID: 700557759H1
ctgagggagantggggtgtgtgtgtttttnttgggatttgtgaggnatccattgaaggaggaagagtgggagatttatgtcgtcttggttttatttggaagtagtgattggagctttgttgaagctcgggttcggttacgctgtatttggctgcatgctactctggctggtgttgaattctgctgtttcgatgagtttgaggtcaaaaaggacatgttatggagctgtngtttgttatgaaggcttcagataaannaaatctcttgtttct

SEQ ID NO: 3468 - DNA, 277 bp, Glycine max
  unsure (1)..(277): unsure at all n locations; Clone ID: 700557761H1
ataggagcgagatagcgaggaaatttggttnttanttnttacccgcagacagaggaaggaagggaaatagatggaagctgtgtgtggaagtggaagcagtgtttgggtcacatnctcccttacacgnnncacccaagatcacantccctntattccgcgccagttaccagcacctaacagcatttccttcacaatccctnttttctcctatcacccttctcgctatgctaatgctagaaccctccgcgccagaacctnctccaaacccattttcctt

SEQ ID NO: 3469 - DNA, 279 bp, Glycine max
  unsure (1)..(279): unsure at all n locations; Clone ID: 700557762H1
cttcgcccagcaccacctggctgctggtaataatagaccaccgctacngcctcaggactccagctcctgttctgccctttgaccctcccattcataataatantaagcccaaagatanaagatttccgtttgangctggactccttcaaccaaaagattcaggagaccagcgtgaggcttctgcacttcgtgatgaggttgatatgctgcaggaagagaatgaaagtattctagacaagctcagactcgaggaagagagatgcaaggntcagaggccag

SEQ ID NO: 3470 - DNA, 279 bp, Glycine max
  Clone ID: 700557763H1
ttgagcccacacctcaaatcccttcacctgttaaagctgtttctgccataccctctgagaagccacaacctccagctgcaaaattgaatattgatgaacttcagcgtaaaactgtttctctactggaagaatatttcagtgtcaggcttttggacgaggcattacagtgtgtggaggaactaaaagctccagcttattaccctgagtttgtcaaggaagccatttcccttgcactagataagagtccaccatgcgttgaacctgttgcaaatctttttg

SEQ ID NO: 3471 - DNA, 280 bp, Glycine max
  Clone ID: 700557764H1
taaccagctatagttattttttgagtgaaggttagaagtgctacaaacaatggcaactaatcaggaagaggtgtctcttttgggagttgttggaagcccatttgtgtgcagggtgcagattgccctcaagttgaagggaattcaatacaagttttttgaagaaaatttggtcaacaagagtgaactgcttctcaaatacaaccctgttcacaagaaggttccggtgtttgttcacaatgagaagcccatagcagagtctcttgtgattgttgaatacatt

SEQ ID NO: 3472 - DNA, 277 bp, Glycine max
  unsure (1)..(277): unsure at all n locations; Clone ID: 700557765H1
catctttccctgttgtctntgnncccaccaaacaagagagaaatggaagcagcatgggccacaattctgactctgatactgatantcgctctgatatgtgcatggaaggtgctgatctggttatggttgangccaaagagactagaaaagctgctaagagagcaaggccttcaagggaatccatacacactttttgttggagactccaaggagtttctgaagatgagaaaggaagccttatccaaacccatgaatctctctgatgacataataccac

SEQ ID NO: 3473 - DNA, 275 bp, Glycine max
  Clone ID: 700557766H1
ttccttcatggctagtagactggatttctgaggaaggtggatacttcattggcaatttgcaacctgctgcatatggacttcaggtttttctcacttggaaacctttgggccattgtatcatctttaggcacaacaagacagaatcagggcattttgaatttaattgaggccaaatgggatgatattgttgctcaaatgcctctcaagatttgttatccagcactggagggtgaggaatggcgtataaccactggctgtgaccccaagaacacgta

SEQ ID NO: 3474 - DNA, 274 bp, Glycine max
  Clone ID: 700557768H1
taagaaaccaaagacatccttctcctggatgtggctcccctcactctcggaattgaaactgttggtggagtcatgacaaagttgattcccagaaacactgttatcccaaccaagaaatctcaggtgttcaccacctatcaggaccagcagactacagtctccattcaggttttcgaaggcgagaggagtctcacaaaggattgccgccttcttgggaaatttgatctgtctggaattcctccagccccaaggggtacgcctcaaattgaagtga

SEQ ID NO: 3475 - DNA, 275 bp, Glycine max
  Clone ID: 700557769H1
tacgaaaagggcttgattgcacatccttttttctttctgggttggaagaacttttccgataaaagattgattcaccaaaaaaatggtgctggatccagcaaggctggtgctggtgcttttgatcagcacctgcattttggccatcaatggtgacacagatccaaatgacattacttctctaaaggttttgtttcaaagtatgaactcaccttcccagctaaattggaatggtgatgatccctgtggacagtcttggcaaggcatcacttgctctg

SEQ ID NO: 3476 - DNA, 254 bp, Glycine max
  unsure (1)..(254): unsure at all n locations; Clone ID: 700557771H1
ctctctcttctctctctgcgtttcactgcagaaccaaaacaagctccggagaaaccgcaacaaaaaaagaaaaaaacacacaaacttaacccaaaactgtaaccccagtatgccatgcttcacaccacaccattctcttctcctcntccttctntctattttcttcttctntctctccgtcancgctgcaagaacctcttctttccattccttacgtattcaagatggaattgagggtggtggcgagggagaac

SEQ ID NO: 3477 - DNA, 276 bp, Glycine max
  unsure (1)..(276): unsure at all n locations; Clone ID: 700557772H1
cctccctcgccactttcttcctaattctctcaataagggttttacttttttgcttaaacccgcngccatggcgacgagggcagcagtggcggcgccgcgcgtttttcggcggtttttctgcacaaactcagcctctccttctttccccttcgttcctacgccgcctcctggcgccacccccactccaactcgacccacggcggagcncaaccccaacctcttcgtctctggtcttagcaaacgtactactacagaaaggcttcgagaggagtttgc

SEQ ID NO: 3478 - DNA, 276 bp, Glycine max
  unsure (1)..(276): unsure at all n locations; Clone ID: 700557773H1
acttgactcgattgcaagtnnatccacgacacactgttcgcttcacaaaagcttcgaatccaattcctcagtaacatctgcannaagtcttctccttcaccatgccaccaaagcctttagactatgggtcaataaatgaaaacgtgaagaagagtcaatatgctgtcagaggtgaattataccttcgagcttctgagcttcagaaagagggcaaaaagattatatttactaatgttggcaacccacatgcattgggacagaaaccactgagcttcc

SEQ ID NO: 3479 - DNA, 272 bp, Glycine max
  unsure (1)..(272): unsure at all n locations; Clone ID: 700557774H1
atgtggatggctttcatcccttaaatattggaaatcttgcaataagaggaagaaagcccttctttgttcctgtgctcccaagggctgcattgagttgttacttaggcacggtgtggaaatcaaggggaaaacagcagtgataattggaagaagtaaaattgtggggttacccacttcctgctattgcagtagaggcaccacgcaacagttcagcgtgttacacgcgtatacaaagaacccagaacatatancttctgaagcagatattgtgg

SEQ ID NO: 3480 - DNA, 269 bp, Glycine max
  unsure (1)..(269): unsure at all n locations; Clone ID: 700557775H1
gaaggaaagggaaaatgggtaaggatctgagcgaggaacaagtgtcttccatgaaggaagccttctctctattcgacactgacggagacggtcggatcgctccgtcggagctggggatcctgatgaggtctctgggaggtaacccgacgcaggcccaactcaaagccatcgtggctgaagagaactcacggcccccttcgacttcccccgattctcgatctaatggccaaacacattaaanccgaacccttcgatcgccaactccgcga

SEQ ID NO: 3481 - DNA, 270 bp, Glycine max
  unsure (1)..(270): unsure at all n locations; Clone ID: 700557776H1
actccctcctcttcacacattttcttagctctctccaacaatccctctcgttcacactttcagattgtgtgaagatgggggctggtggccgaactgctgttcntcctgccaacaggaagtcagaggctgaccctttgaagcgggtaccatttgaaaaacctcagtttagtctcagccagattaagaaggccattcnacctcactgtttccagcgctctgttctccgctcattctcctatgttgtttatgactcaccatagccttctgcct

SEQ ID NO: 3482 - DNA, 273 bp, Glycine max
  unsure (1)..(273): unsure at all n locations; Clone ID: 700557777H1
tggcatgtgccattactacatcatagtcatttcctattttctctttcagagatctgagctccaacatgttaacaggttcaatcccagattcatttcaggatttgggaaatctanattacttgtttctgactaacaattctctaagtggaccaattcctgattggatactgagcataaaacagcaaattgatttatctttgaacaatttcacnaagacttctgcanataattgccaaaggccggatctgaacttagcttcaagcctctctcgca

SEQ ID NO: 3483 - DNA, 274 bp, Glycine max
  unsure (1)..(274): unsure at all n locations; Clone ID: 700557778H1
ctactttctctctttctagttcgtgttcttcgtcgcaaatccgaagtaggatctctcttgttttttctctaggtttttcgcgatggcgtcgaagcgaattttgaaggagcttaaggatttgcagaaggatcctccaacatcttgcagtgccggtcctgttcatgaagatatgtttcattggcaagctacaattatgggtcctccagacagtccctatgctggaggtgttttcctagtgactattcattccctccagattatcccttaagccanc

SEQ ID NO: 3484 - DNA, 254 bp, Glycine max
  unsure (1)..(254): unsure at all n locations; Clone ID: 700557779H1
gggcatagattattcgtgatagatacaaagctcaccataatagtatagtacattgtacataacacctctattttgcatataataataaacaaattttaggcatagaggcaaacgnctatggaagaaaacctggaaacacccgacatnnaatcttcaacacaggagttgggcnccgtagacactgagacaccactaatccattgaagttcttggggacttttactgtttcaatcatcaatcaaagttgcatgatt

SEQ ID NO: 3485 - DNA, 274 bp, Glycine max
  Clone ID: 700557781H1
gagaagttggaatggcagcggttagtgttagtgttactgtgagagtgaggtggtgcactcgaaaaccacccactccaactccaaccagattcagcgttaatgctctgtttggtgattggggatttgggaatagaacaaggaactcccttcagcagcaattcacgttcactcttgctgatagtaaagtgataagcgtgtcggttgtttcttcgatctcagatgttgcatcgagcgaatgggacgcttgtgctttggatgcgactggccctgacaa

SEQ ID NO: 3486 - DNA, 204 bp, Glycine max
  unsure (1)..(204): unsure at all n locations; Clone ID: 700557782H1
tcttcgcccagccaacatgagctcaatcgttcagggtttcaccaagtcgctggccatgaccattctctctgagatcggcgacaaaactttttttgcagctgcgatactggctatgcgacacccaagacgcctagtcttatcnccgttgcttatcggctttgattgtgatgaccattctctctgttcttgttggctgggctgctc

SEQ ID NO: 3487 - DNA, 272 bp, Glycine max
  unsure (1)..(272): unsure at all n locations; Clone ID: 700557783H1
taacactaccctgaacatagtaaagaagccagtgctaggatttgttagtgaagcaatggctcaaaccatgttgctcatgtctagtgtctctagcagttattccgtggatttgaagaaagaccttttcctccaattgcagagtcaaagtttaaggcctaagttctctcagctntcattcancccanttccatcatcaanttcttccttttcttcaccccgtacattcacaactctggccctcttcaaatctaagaccaaagccgctcctgcta

SEQ ID NO: 3488 - DNA, 273 bp, Glycine max
  unsure (1)..(273): unsure at all n locations; Clone ID: 700557784H1
ttcattctctttgcgcagttccctacctctcctttcaagatgcagatcttcgtcaagaccctcaccggaaagaccatgcacccttgaggtggaaagctctgacaccatcgacaacgtcaaggccaagatccaggacaaggaaggaattcccccggatcagcaacgtctcatcttcgccggaaagcagctcgaggacggccgtaccctcgccgactacaacatccagaaggagtcaacccttcaccttgtncttcgtctccgtggtggcatgca

SEQ ID NO: 3489 - DNA, 273 bp, Glycine max
  unsure (1)..(273): unsure at all n locations; Clone ID: 700557785H1
cntacagctttctatgaaggcattggacttaacacaaaagaatttgacatgcatgtgcatcatcgagacaaaccgcacaactgctaggattttcccagctgttcttgatgttgaaaacccagagttcaagcggaagttggaccggatggtggagataaacgagaagattattgctgttggggagagtgatgacatagcggtggtgaagaacttgaagaggatcccactggttgctgcattggtgtctgaactcttggcaacatatctaatgcc

SEQ ID NO: 3490 - DNA, 273 bp, Glycine max
  unsure (1)..(273): unsure at all n locations; Clone ID: 700557786H1
ancagcatgaatgggatggtatataaggagaactatagaggcaaagaagagagtattgatgancgcgaaattgaaacgctaaagatggagaagaagcaatcggaggtgatggagcagttggtgaagcaagcctctgcttcccccaacgctaacgcactcacttccatcctcgtccaagccacttctcaccccaacgtcttctctttctctcaatttctcgccctccctaaccttctacagcttgaagcaactgagaattctacttatcttgat

SEQ ID NO: 3491 - DNA, 271 bp, Glycine max
  Clone ID: 700557787H1
tgccattgacgccttaaagaccgcagatatggataagcaaaatttagatgataatgagaaaggggaacagcaaaatttaaatatagctcaaaatatttgttctatcctagaacaagttgatccaattagaaccaactattggatttggcgcaagagcagacttcctctatcagcttagtaatcaaagtaattaaaggacaagtctgtgtcatgtgtactttatacctagtttattgaaagtggatgtttatttttttgtgatgttgtcatt

SEQ ID NO: 3492 - DNA, 272 bp, Glycine max
  unsure (1)..(272): unsure at all n locations; Clone ID: 700557788H1
tccattatccgttgttaatggaaatggaagtggaagtagcacttccattttccaatttccantttccagtggagtagaacacattncattcaattgcanttttttataatttcatatatcctccaatattgctngtggttagcactcacaaganacaggctcaactaccagacaaattttccattcccggcatctcctccaaacctacgtaccccagataccctaaattcgattcatacacataacacaacacaacctcgttccttgctgac

SEQ ID NO: 3493 - DNA, 265 bp, Glycine max
  unsure (1)..(265): unsure at all n locations; Clone ID: 700557791H1
tagaattgtagaagcttcacttcactctcatcaactcagagttgcatagaaatttgtctctatttttgttatttctctcttctttgtggacttttagcaactatattgtttccantgtccaagatgttgggagtgtttgtgggacttttgttggtggggttggctgcctctgccaagtttgatgaactcttccagcccagttgggctatggaccattcatccatgaaggagaactcctcaaactcaaacttgataactattctgg

SEQ ID NO: 3494 - DNA, 269 bp, Glycine max
  unsure (1)..(269): unsure at all n locations; Clone ID: 700557792H1
tctgaattcattagttatcctatttacctttggactgagaagacaaccgagaaagagtcagcgatgatgaagatgatgaacccaagaaggaggaagaaggagacattgaggatgttgacgaggagaaggagaaggattccaagaaaaagaagangatcaaggaggtgtctcatgagtggcaactcatcaacaagcagaaaccatttggctgcgaaanccagaagagatcaccaaggatgaatacgctcttctacaagagcctcaccatg

SEQ ID NO: 3495 - DNA, 270 bp, Glycine max
  unsure (1)..(270): unsure at all n locations; Clone ID: 700557794H1
cctaacaaaaccccantctcattcatcgatggggaagaagaaggatagaatcgttcttccaccgganttccgccncgagattcccgacgaggaagttgaagtttccgacgatgacctccaattcgtcaaggagaaccgcgctatgcctcttgtttccaccttggacacccgtncaatcaccaagcatgttacacgggttgctgatgccaaagacgatgcattggagaaactttatgagaaacgcatgcaaaagaatgctctcaagaaaga

SEQ ID NO: 3496 - DNA, 274 bp, Glycine max
  unsure (1)..(274): unsure at all n locations; Clone ID: 700557796H1
gtggtgttgtggcgtttggtgagttgagttcattctcaacatgtcgatgctgctgaggaaggtgtgggaaagggtgttatggagatctgattcttcaacgtcagcatcagcnnnnnnnnnnnnnnnnnnnnnnnnnnnnnnnnnngaagtggcatgttctgacatgggtgagttggagctgctacccagtgacatcttgatgcacattctgagacttttgggtccaaaagaggctngcaaagttgagtgtggtttgcaaggctttgagatccct

SEQ ID NO: 3497 - DNA, 296 bp, Glycine max
  unsure (1)..(296): unsure at all n locations; Clone ID: 700557802H1
tctgtntcctccttctccttctggaaaancccaacttgcactctgttatgccgatgcatgaatgaatctttnctctccgaaaccctaaccaatggtggganccaaacggnacttcctcccactgatctnanctccntcgncgccttcatnttctacagcttcnacaactnntatctnattgttgaatccnngaatnaaaccctanttccaantttccctaaccnanatngnanccaatnntcncccaatttcanttttgtgatnaaggtcctagggttaaanagnntngaagngnt

SEQ ID NO: 3498 - DNA, 302 bp, Glycine max
  unsure (1)..(302): unsure at all n locations; Clone ID: 700557803H1
gtggccactgtaagaagcttgctcccgagtatgagaaagctgcttctatcttgagtagtcatgatcctccggttgttttggctaaaattgatgccaatgaggagaagaacaaagaccttgcatctcaatatgatgttaggggatacccaacaattaagattctgagaatgggggaaagaatgttcaggaatacaaaggtccccgtgaagcagatggcatcgttgactatttgaagaaccaaagtggtctgcttcactgaatttaaatctgctgatgaagctangctttncattggtgaaana

SEQ ID NO: 3499 - DNA, 313 bp, Glycine max
  unsure (1)..(313): unsure at all n locations; Clone ID: 700557807H1
tcagaagcaaagagacagagtcccagnttccatggganacccagtaacgaggagagtgaganagacgagtcttcttctgtttatagttcctcagaagatgaagnggcggaagagatanngaaggagctggctgatgtaacatttgaggagttgcagaaagctcgatcgantnggacacatggcatttttccagaanccccaaagatgacaaanaattaanangggccaanangnantangccaatggaggctantanngaagaagccagtttctgggnttacngaggtcatccaagctccaaaganggttgtc

SEQ ID NO: 3500 - DNA, 303 bp, Glycine max
  unsure (1)..(303): unsure at all n locations; Clone ID: 700557809H1
agaattgttctctgaattttgttttgtttttttgacatcattnacaatggcagccatcatcccctgccactactgtgcttccctcagtcccaaatggttcaattccaacaacacacattctncggcgtttatcgtacccacttcgaggactccgaggtttcaatgctcgttgctcttaccaaccaccccatcattctgaatctcagaacaaccataatgggaggtcattttccttgaagcagtgtgcgatatctattgcactggcagttgggttaataacaggagttctacattggatggncc

SEQ ID NO: 3501 - DNA, 302 bp, Glycine max
  Clone ID: 700557810H1
caactacaaaggttgctgtaggagataagatattgaagtagtgctaagtgcctaacacctgcagtgaacaatggcctctgcatcagcatctcttctcaagtcttcacttgttcttgacaagtctgagtgggtgaagggacaaacacttcgccaaccttctgctgcatcagttgtgagatgcaaccccaccaccccatccaggcctcaccatcagagctggttcctatgctgatgagctcgttaagaccgcgaaaacagtggcttcaccagggaggggtattttggccatggatgagtccatg

SEQ ID NO: 3502 - DNA, 236 bp, Glycine max
  unsure (1)..(236): unsure at all n locations; Clone ID: 700557811H1
ggccattttatgggtacccaatttatctatggacactgcctatcagactaacgttgttgtttaattagtccatgcatctgcatcttgggcaccataagattgtatataaaataaattatggtgtgttgtgtatgttgtgcaagacctggaacttcacctttctacgtacgtgtgctgttaggatgcagtgtgcttgatgatgcttnatgaatatgcagtgtgcttttttaagtcta

SEQ ID NO: 3503 - DNA, 297 bp, Glycine max
  unsure (1)..(297): unsure at all n locations; Clone ID: 700557813H1
ttgtgttgcatatctgtaattttcggttccttgcagcgtttgggatactttttttcccttcatgatttatttggttttcataattaaatattttgaacattccgaaccgagtttaggagtaatatgtttttatgcaacgaataacgaagagnatcatacacctgcaaagtatctctacctttctatcacctgatctttcantttatctctctccttcatcagatatttcactttctccttgtncctcnnatttcccctgcctgnttaccggcctacacccaaaaatgtgtgaataac

SEQ ID NO: 3504 - DNA, 298 bp, Glycine max
  unsure (1)..(298): unsure at all n locations; Clone ID: 700557814H1
cttccatttcatcttctgtttcaaccagattcgtttgctctgaggtctctccaacacacaacaaattctactttctctgattccatttccaccatcatcaccatgtccaattctgaacacaacatcatcnctggaaatgctggctatgtcctgaagatgtccctcatctatctaactacatccctcacctcactacatatcgtaatccattgcaagacaatccttcctattcagttgttgaggagcattctgttgatgtggatgatactattgcgcaaaggtagttgtacataagaat

SEQ ID NO: 3505 - DNA, 297 bp, Glycine max
  unsure (1)..(297): unsure at all n locations; Clone ID: 700557815H1
gttgttgtaactcgttcttcttcttttgttgttctgtgtttgtgtntgttttttctctcacctgaaaatgtcttgctgcggtggtaactgtggttgcggaagctcctgcaagtgcggcaacggctgcggaggctgcaagatgtacccagacttgagctacactgagtcaaccaccaccgagaccttggtcatgggagtggcacctgttaaggctcaatttgagggtgctgaaatgggtgtgcccgctgagaacgatggctgcaaatgtggaccanactgctcctgcaacccctgcat

SEQ ID NO: 3506 - DNA, 297 bp, Glycine max
  unsure (1)..(297): unsure at all n locations; Clone ID: 700557816H1
atcgcctcgtggcggatctaacaccagcctcggtcgctccgtccggtcaacctcacgcggcggaccgcctctngtccaccgatcaggctccactccggaatcgcgaaaaccagaaccgaaattggaagatctaacaggaacaggcttcttacnagccgcccaactgtncacatcatcagcctagacgcaccaccaaaacngcngncgacgccgcngnngccgcngcnannaaaaccgccaccacnagaaccgcnataaccgccgccaccaaagcgttctggcgaccggaatcgaagg

SEQ ID NO: 3507 - DNA, 303 bp, Glycine max
  unsure (1)..(303): unsure at all n locations; Clone ID: 700557817H1
ttntggnggggngtataccgtcttcgctggcttggaagagtgcataaggttcatagctaatttcacgctcgctgaggaggagatcgattttgttagggaatgtttatcttcctcttgtgaggatggattctttgactacctcagaggacttgactgctctgatgttgaggtgtatgctattcctgagggaacagttgtttttcccaaggttcccctgatgagagttgaaggtccagttgccgttgttcaattgctcgaaacaccttttgtgaatctaattaattatgcgtcattagtttctac

SEQ ID NO: 3508 - DNA, 298 bp, Glycine max
  unsure (1)..(298): unsure at all n locations; Clone ID: 700557818H1
ggaaacacacgtgaagtgctccctgaatttctttttggaacttgatctatcttaaccatctggatgctgctaagttagtttgtttgaagctgggaatttcaatgagtctcgtgacaagcacgttttgctagagagaacttccaagtttcaaattagctaatgctgtagtagatctgaagctattcctccagagtgggctgaagctgaacaaatttcataggcaaatgaaaggtctgaaagacttgagctacaatgaaggagtggcaggaacaaaatcagaagacacagaggagngcta

SEQ ID NO: 3509 - DNA, 305 bp, Glycine max
  unsure (1)..(305): unsure at all n locations; Clone ID: 700557819H1
gnagagaaaaagcatatggtctcccgtcacagatccaagaagtggtttcaaccgggaatccagaactttccacagnntcaagcnntttantncgtntccctcccnccaacgncgcagtntcngcagcagcnttngnctctttctcngaagcaactcgnagttcccggactnatcnaccgcntttatcgactctgcnaccggccaccgcatctnctacggcgagctctccacaggcgcnaaaacntagnctcgaatctcgcnacaatcctcaaantaaccaaaggngacaaagngctcgttntctc

SEQ ID NO: 3510 - DNA, 300 bp, Glycine max
  unsure (1)..(300): unsure at all n locations; Clone ID: 700557820H1
tagccttccctacaactccaaacanaaagacatnnatcatccatggctgcctccgtctccactgtncggagctgtcaacagagctcttttgaacctgaatggttctggagctggagcttcagctcccagttcagccttctttgggaccagcttgaagaaggttattgcctcaagggtcnccaacagcaaggtttccggtggaagcttcangattgttgctgtagaagagagaaagagattgaagagacccagcagaccggcaaggacagatggaagggcttgctatgatatctcagccgc

SEQ ID NO: 3511 - DNA, 301 bp, Glycine max
  unsure (1)..(301): unsure at all n locations; Clone ID: 700557821H1
gacttggaggcccatgttgctgattttggccttgccaagttcttgtacgaccctggcgcctctcagtccatgtcctccattgctggctcctacggctacattgctccagagtatgcatacactttgaaagtggacgagaaaagtgatgtgtacagctttggcgttgtgctgctggagctgataatagggaggaagccagtgggagagtttggagacggggtggacatcgttggatgggtcaacaaaacgagattggagctcgctcagccgtcggatgcaacgttggtgttggcagtngtgg

SEQ ID NO: 3512 - DNA, 301 bp, Glycine max
  unsure (1)..(301): unsure at all n locations; Clone ID: 700557822H1
ctcccaaactctctttgttgtgctgcttcagcgtctggtagcaaagatggcgacattgactgcttcaagtaacttagtctctagaaattctcatgtccaccatggaccaacaactgcttcatatgagtctaaagcagtatcaatgggacttagatctctgaagcagacaaatactcataatggactaagaattttgaacccggtggatgagctacttaacagaaccccaattaaaaccaatgcagtgcaagctatgaggaagggacctcaaggcagaatgccaggctaaaaggcngatcac

SEQ ID NO: 3513 - DNA, 293 bp, Glycine max
  unsure (1)..(293): unsure at all n locations; Clone ID: 700557823H1
cagagcctctgcttccgacacaaatcaatctttctgatcatatattattcttactgtttttttaatttattctccatacacatgcagacantaagttcgaacaagttcaggagcggcatggatttcttccaccgcgcgaaggcggtgcgcctccgcagccaccacgacaagtacctcctcgcggaggaggacgaggagtcggtgacgcaggaccgcaacggctcctcnaaaagcgcacggtggacggtagaatacgtggccgaatacgacaacatattcgctgaagagctgtt

SEQ ID NO: 3514 - DNA, 300 bp, Glycine max
  unsure (1)..(300): unsure at all n locations; Clone ID: 700557824H1
tgaaggtgaatttaggttgttgggtaggagagaagggaatcgttatggtggtggtaggttttttggtttggaagagaatgaagccaacagcaggggaagaagagtgtcatttagcatggaanctaatcgtaaagagtacctaagccagaccctagagccaggggacatatctgcaactagctttgatgatgaagaggtcacaagtgatggagaatatggtgatggacaggactggggcaggagggaaccagagatatatgtcggcatatcgatcatgtccaatatgcttggtctcaacaa

SEQ ID NO: 3515 - DNA, 299 bp, Glycine max
  unsure (1)..(299): unsure at all n locations; Clone ID: 700557825H1
gaactcatcacttactggaagccttgttgtgagtaagagancaggcttcctgcaccgagcacaccaacttgatacctctgattctttctttgcttagaattccacagaatatggagacncgtcttntcaatcactccccacctttggaattcaagggtttgagcaaggaggaggaagactcattgctagggcaagtggaaatatggaggtacatgacatgcttcacggactccgtggccttgaaagctgtcatagagcttcganngngaggacatactagaccgttatggtaaaccata

SEQ ID NO: 3516 - DNA, 300 bp, Glycine max
  unsure (1)..(300): unsure at all n locations; Clone ID: 700557826H1
gnaggagaagaaaatagtcgttcgagatggcccgtacgaagcaaactgctcgtaagtccacaggaggaaaggctcctaggaagcagcttgcaaccaaggctgcacgtaagtctgcaccaactactggtggtgtgaagaagccacatcgttaccgtcctggtaccgttgctcttcgtgagattaggaaataccagaagagtaccgatcttttgatcaggaagctccccttccagaggctggttcgtgaaattgctcaggncttcaagactgatctgcgtttccagagccacgccgtgcttg

SEQ ID NO: 3517 - DNA, 296 bp, Glycine max
  unsure (1)..(296): unsure at all n locations; Clone ID: 700557827H1
tgaatggctctttgaaggaagtaccattcagttctctcaganangttntccatgattgtgtcatggtatcttganatganagagattctgantttaattgtgtntcacctccttcaagaacttganaccctanntaccaagcaatccccaagagtccaaatatatngataccatgacacaatcatggaaaacttctctgagaganctgaatggctcttgaaggaagtaccatggaaggccttttccaaaatcgtgctgtgtgggctatganatatgctcatttctgtggtagttgg

SEQ ID NO: 3518 - DNA, 295 bp, Glycine max
  Clone ID: 700557828H1
tgccaatgcactcaggcaagcaaaggctctaggagatgaattggttgtgggtctagtgagtgatgaggaaatcgtggcaaataaaggaccacctgttttgtccatggaggagaggctggcccttgtcagtggattgaagtgggtggatgaggtcataactgatgctccttatgcaattaccgagcaattcttgaatcgtctcttcatgaatataaaattgattatgtcatacatggtgatgatcctgcttgcttccagacggaactgatgcatatgctgcagcaaagaaagcggt

SEQ ID NO: 3519 - DNA, 293 bp, Glycine max
  unsure (1)..(293): unsure at all n locations; Clone ID: 700557830H1
cacgtacaaagtgaatgagaagagtgatgntacagctttggagtggtgttgatggaactagtaactgggaaaaggccaactgaaccagaatttggggaaaataaggacatagtgagctgggttcataacaaggcaaggagcaaagagggacttaggagtgcggtggattcgagaattccggagatgtatacagaggaagcttgcaaggtgttgagaacagcagtgctgtgcacggggactctccggctttgagaccaaccatgagactgtggttcaaaagcttgaggatgccg

SEQ ID NO: 3520 - DNA, 295 bp, Glycine max
  unsure (1)..(295): unsure at all n locations; Clone ID: 700557831H1
ttntgatagatgcatttcttggaaggatcgttattgggtcaaggccagtctctggataataatcttcagttatgttgggaattatttctggactcattacttttttacagttcttggtgcatcttatacctttccatcatggaaaatgaacaatgtaccacacacaacattcctgctcactcatgtttgcttcctgtnttatcatgtttcatcgaacatgacactgcgtcgattacggcattttattgctggtttgccagaaaaacttcaatgggctactgaagctgcatggatt

SEQ ID NO: 3521 - DNA, 296 bp, Glycine max
  unsure (1)..(296): unsure at all n locations; Clone ID: 700557832H1
ctgggagagcaccttccacttgcgtcacctccctgantcaaacatctcagagatccctganctcattgatgagtacaggaaggtgatgaaggattttgctttgaggttagagaaactagcagagcagctgctggacttgttgtgtgagaatcttggcctagagaaagggtacctcaagaaggctttctatggatcaagaggaccaacttttggcaccaaggttgccaactaccctccatgccccaacccagagctggtgaagggtcttcgtccccacactgatgccggtggaatta

SEQ ID NO: 3522 - DNA, 302 bp, Glycine max
  unsure (1)..(302): unsure at all n locations; Clone ID: 700557833H1
ttggtgactactacttggatgagctggtggatcgcagcctggtgcaagtggcgagtaggaggagtgatggtggtgtcaagacatgtcggattcacgatcttcttcgtgacctctgcatatcagagagcaaatcctgtaagtttttggaggtttgcacggaggtaaacattgatactctatccttgagcaatcctcgtagattgtccttgcaatgcaaagcacggcctaatatctgtacaaaaaaatttaatcaatcatacactcgttccttgttcttctttnctgaaattatgcacacacgt

SEQ ID NO: 3523 - DNA, 136 bp, Glycine max
  unsure (1)..(136): unsure at all n locations; Clone ID: 700557834H1
aaagaagataaggatgancagggcaagtngtggtgaccaacggtngcggatgcgctgctgtcgggaagggccgganagtcgccgccggcnaagaggagcanaacccggcgtcaccggtggcgcttctgctggcggc

SEQ ID NO: 3524 - DNA, 301 bp, Glycine max
  Clone ID: 700557835H1
cataaatgcagccttaagatccattctataaacaaatggctgctgagttttccaagtaccaaatctcaacaaatgtgtatgcattcagtgataagtacactgacatagcctccttaggaactctggcaaagtatactgctggtcaagtgtattactacccagctttccaatcagccattcatggggagaaattgagacatgaattgaggagagaccttaccagagaaactgcatgggaagctgtatgcgcattagatgtgcaaaaggtgttcgcttcacaacttatcatggaaacttcatg

SEQ ID NO: 3525 - DNA, 300 bp, Glycine max
  unsure (1)..(300): unsure at all n locations; Clone ID: 700557837H1
tcttcttctcccgctcgcgccttctgtctcaatctcaatccaccagaaatggcaacaatagttagccaccaccaccgcctattctccgccgccacgcgcttcaattccactggcagagactcgcggcggcaaaggagcggcgcaaactcggtccggtgcgctgacgtaagcacggtcacgagcgagaatcagcgagtgacggtgagtaacaggagcgattcgctggagatatgccgcgtgctgaacggaatgtggnagaccancggcggatggggccgaatcgaccgagacgacgccgtc

SEQ ID NO: 3526 - DNA, 303 bp, Glycine max
  Clone ID: 700557838H1
tgcagaagaacaagtagttgagaactaagaaggagaagcaaatggcttcctcaatgatctcttccccagctgttaccactgtcaaccgtgccggtgccggcatggttgctccattcactggcctcaagtccatggctggcttccccaccagaaagaccaacaatgacattacctccattgctagcaacggtggaagagtgcaatgcatgcaggtgtggccaccagttggcaagaagaagtttgagactctttcctacctgccagaccttgatgatgcacaattggcaaaggaagtagaatacc

SEQ ID NO: 3527 - DNA, 301 bp, Glycine max
  unsure (1)..(301): unsure at all n locations; Clone ID: 700557839H1
tggcagtagcactactcccttattgtgctctttgttctttatttcttccttactttttgcttcctgcacncatgcctcctccnagggcactcctccaattgtggatggacttttcatgggattccaaaaggacgnacnagtccaagcctnaagggnnaaggaacaagcnncctcaanaagtgtcnagtanggnnatngncaagnttcnggcntaaccnaggnccntcctnccaangattgcttgttccagggttccaatgggccganatngtgggttgaagnncaactnaaaaggttcacc

SEQ ID NO: 3528 - DNA, 297 bp, Glycine max
  unsure (1)..(297): unsure at all n locations; Clone ID: 700557840H1
ccatctccacaccaagttcccagaagaatggatcactcttgggaagcacaaaagcttcttttcttagtgggaggaaactgaaggtgaacaactttacagcaccagttggagcacgatccancactacagtttgcgcagttgctgagcctgataggcctctgtggttcccaggcagcacccctcctccatggctagatggcagtttgccaggagattttggctttgatcctctaggtcttgcatctgatcctgagagcctgagatggaatgtccaagcagagttgtgcatgcagatgg

SEQ ID NO: 3529 - DNA, 294 bp, Glycine max
  Clone ID: 700557842H1
aattaatcaccttttttcttgttaattttttcccccttccttcgtgtagcggttggagcttttgttattgctgagatgctgtttagctccaaccttcttgctatcgttggagctggtcatcagccatctttgtctcctcgccgtctttgtttattcaatacaaccactggagctgctcttagagaattgaattttctaacttccatacttgctgttcgcatgaatagacaaagactcatgtccatttacaagacaaagcatatatatatgaaataaatagtctcacaacttgga

SEQ ID NO: 3530 - DNA, 160 bp, Glycine max
  unsure (1)..(160): unsure at all n locations; Clone ID: 700557843H1
agatggccatctatgatttcaaaatgtgttatcactcttacccataacttgcaggatctcaatgccaaggaatatgcagtgnngggtncctgttcagtccttgcctcacaaacagttctcaagcatttgatnaacggatccaaagtcattctcttcattt

SEQ ID NO: 3531 - DNA, 294 bp, Glycine max
  unsure (1)..(294): unsure at all n locations; Clone ID: 700557844H1
tgatcgaacagcatgttcaagcttttggttagtagagcagctagggtttcaactccacacaaccacaatgntgttgcttctttcgctttctctaggtatgctcattcattaccatttgcaactgtagaagcagaagagatatcaggctctagggctgctgaagttttgaacctggtgcaaggtanatgggtaggatcttcanattggaatacagttgtagatcctttaaatggagactccattattaaaagttgctgaagttgatgaaacaggcatcagccctttgtagaaagc

SEQ ID NO: 3532 - DNA, 294 bp, Glycine max
  unsure (1)..(294): unsure at all n locations; Clone ID: 700557845H1
cttgcaattgaagttgaagtcttgcccttctctcttcaactccaaacacaagacatcatcatccatggctgcctccgtctccactgtcggagctgtcaacagagctcttttgaacctgaatgggtctggacctggggtttcagctcccagttcatccttctttgggagcagcttgaagaaggttattggctcaagggtccccaacacaaagatttcctctggaagttcaagattgttgctgtagangagaagaaagagattgaagagacccagcagaccgacaaggacagtggg

SEQ ID NO: 3533 - DNA, 292 bp, Glycine max
  unsure (1)..(292): unsure at all n locations; Clone ID: 700557846H1
anatagaacgccccattctctgttcctntctgttctctgttacgtttcggatttcacttctaaagccccaaatttatcatctttttccaaaccccattattattccccctccaaaacctcgttcccattttcttcattcgtcgcgttttattttcgattcttgaggngcgtcgagatctccagcggagcatggnggcggggacaatggcgatgcggccggtgnggcggtgatgctctactacgtgctgagcangcggatggcgcggnaggaggnggacgatggcgaggatca

SEQ ID NO: 3534 - DNA, 295 bp, Glycine max
  unsure (1)..(295): unsure at all n locations; Clone ID: 700557847H1
ttagccttccctacaactccaaacataaagacatcatcatccatggctgcctccgtctccactgtccggagctgtcaacagagctcttttgaacctgaatggttctggagctggagcttcagctcccagttcagccttctttgggaccagcttgaagaaggttattgcctcaagggtccccaacagcaaggtttccggtggaagcttcaagattgntgctgtagaagagaagaaagagattgaagagacccagcagaccgacaaggacagatggnagggtcttgcctatgatatc

SEQ ID NO: 3535 - DNA, 283 bp, Glycine max
  unsure (1)..(283): unsure at all n locations; Clone ID: 700557848H1
ctcttgggaatatgtggccttccanacaccatttttaggaatgctgtggaaatggcttagctgattctgagtgttatggacttgaaaatcctaacgcgcgattgtcttgttttgtcaacaaggctttcgcgaatatcggtagtgacatggcaaagcttgtccctggccgtgtttcgacagaagtggatgcgcggcttgcttatgacacacatgccattatcaggaaggtgcatgacctgttgaagttgtacatgatanntatgtacctccgcaacgtctgttg

SEQ ID NO: 3536 - DNA, 231 bp, Glycine max
  Clone ID: 700557849H1
ctccacaggagcagagaatgcatcgcttcatcatcctcaccattctcctttccctggcactcgcagatggaggttccattggagttaactacggtcgtatagcgaacaacctcccctccgcggtgaaggtcgttcaactcctcaaatcccaaggactgacacgtgtcaaagtctacgacaccgacccggcagtgttacgggcactatccggatccggaatcaaagtgaggt

SEQ ID NO: 3537 - DNA, 293 bp, Glycine max
  unsure (1)..(293): unsure at all n locations; Clone ID: 700557850H1
tccatcgtcttcgttggctcattcgattccttagcttcacatctccatggcgctgcaccggttactgaagaggaaaggaggcgtcgatgaacttaacgacgatttccctctcgcttctccggcaaccaagattcgccgtctcgacgctgagttgccgccaattttggaagaggacgaaccgttacctaacgaggagagagctctcgttctcttcnaagctctcgtcnattccccttcntctttctctctcactcncgattctgacttatgaaaggaattaggaacatcatatc

SEQ ID NO: 3538 - DNA, 295 bp, Glycine max
  Clone ID: 700557852H1
ccatttcttagatatgtgatatacacaccgacatatcaccacctacaccactctgataaggacactaatttctgcctcttcatgcctctctttgattcacttggcaataccctcaacaaaaattcatggcaatcacacaaactactaagttcaggttcaggaaacggtgacatggtaccccattttgttttcctggcacatatagttgatgtgtcatccagtatgcatgctcaattcgtctatagatcctttgcttcattgccatacacaacaaggttcttcttgctcccaggct

SEQ ID NO: 3539 - DNA, 298 bp, Glycine max
  unsure (1)..(298): unsure at all n locations; Clone ID: 700557853H1
tgcagcgaagaatggcgaagaggaaggagcggattcagaacccggagccattcgatccgtacggcgccgaccccgcgaagacgaagaagcgttcgatnccgccgaagcggcaccagcaggaagagcagttcattgctcccaaactcagctccaagatcatgaagcaggcgtgatccagcagaaggaggaanagaaggaggaaacgcacganaacaacgccgccgcgaatttattcgaagaggttccgancttcgaggaanacggcggtgacgacatcgacgacttcgccggttctccc

SEQ ID NO: 3540 - DNA, 296 bp, Glycine max
  unsure (1)..(296): unsure at all n locations; Clone ID: 700557854H1
anattacatagcctcagtaatctgagagagaaacaaaaacaatgaaggtttccattgccaagttccactcccttcccctatgttttttccttctcttggccttcaacacaaaacccctcctagcagcagaaccagagccagtggttgataagcaagggaaccctttggagccaggagtagggtactacgtgtggccactttgggctgatgaaggaggctcacactaggccaaacaaggaacaagacatgccctctttatgttatccgtgacccttcatcattggcaccccagtttc

SEQ ID NO: 3541 - DNA, 298 bp, Glycine max
  unsure (1)..(298): unsure at all n locations; Clone ID: 700557855H1
aaacatagcataattgaagcctaactctttagtcttgaagagagagagaggcaaggnacgaacgacgtattctctctcctccactcacctncaaatccaaatccaaatcccaattctccagtcttgctatgggcatcaatttcgtccttatctctcacttctgtttccctccccanatctcaatctctggaccccaagaaaatctctgattcttcttcctcctctggcagcaggagtcaaagttgttgttgcgcgccatcggttccaacgaagaaagatgcttctatcttccgcngcc

SEQ ID NO: 3542 - DNA, 298 bp, Glycine max
  unsure (1)..(298): unsure at all n locations; Clone ID: 700557856H1
anattatgaagtttttcttgacaacttttattggtatagttttcggattctttataggagtatcaattccaacattgtcaataacaaagttgaatctcccatctngcctgcttccctccattgatctttcttacattgaagacagatatgcaggtcgccaggcttggtcttttatgaataatggtaacaaaagaagttcatcgcaagttcaattatcaagtgatacatcaaagatttgggttccctcaaatccaagaggtgcagaaagattacctcctggcattgttgaagccgagtc

SEQ ID NO: 3543 - DNA, 292 bp, Glycine max
  unsure (1)..(292): unsure at all n locations; Clone ID: 700557858H1
aacaaacacaaattttatgtgattagtcgcggtatttaaaataaaanatgaaagtagacanataaaaaagagaaggagaatgtttgangttgattgtggctgataatgaagtgggaagtttaaaacngccttggaaggtanatatgtgganccagggcctggtggtgacccaataagaaatcnacaagtcttgccancaggannagaatattcatgccctggacccncaatctattcctacaactgcagcgattgatagtnccanatagtggtagataggttgattgggagg

SEQ ID NO: 3544 - DNA, 293 bp, Glycine max
  unsure (1)..(293): unsure at all n locations; Clone ID: 700557859H1
anaatctctaagagtggcatccaaatcaacactaaaggtttcaaagacaaagaatacttcactcgtgaccagatgtganattngtgacagtctggaagaattcctcacnaaagcancaccagataaggggttgatcaggttgttggtgtccatgggagaagcattaagaacaatttccttcaaagtgaagacngnttcttgnggtggancacaatgngtnaatacttttggggncgngcaagcttgcagtggatttgctagctaatcagcttctttttgangccttaattatc

SEQ ID NO: 3545 - DNA, 288 bp, Glycine max
  unsure (1)..(288): unsure at all n locations; Clone ID: 700557860H1
aacaattccccacaaggancatacattactttgttctntttctttttctcaaatctncttttaaagacaatcttatttgtntatntctgnacgagaattcgaaccttgaacaacatanacatgggagtaancacacgtacactagagatcaccgttatctccggggtaaanctccgcgtaacggaggacgcgtacgtcgtcgttcgggcggagtcntaaatgctgcaccacgaggaccgccagggnngacgganncngantcctntctggaagannggttctattggg

SEQ ID NO: 3546 - DNA, 285 bp, Glycine max
  unsure (1)..(285): unsure at all n locations; Clone ID: 700557861H1
ttgcattattgcagataagatcaaccctactcccttcagttgttgtaaataaaatatttcggaaaaaaaaggggctgcttgaatgaagagggcatgattcgggccaagatggcatcacttcatgctaatgtgacatcagttgtttgcaagagtggcaaccatgcttctcaatcgaaattcacaagctcttcattcttgcctggttttgatgttgttggtcgtgctcaaatgcttggaaganagaattgtcccatctcatttccttggtgcctagagccacatacc

SEQ ID NO: 3547 - DNA, 288 bp, Glycine max
  unsure (1)..(288): unsure at all n locations; Clone ID: 700557862H1
tgaattccgacaatgggggagcaggactcctggacatcctgagaactttgagacagttggaattgaagtgactacaggtcctcttggtcagggcattgccaatgctgttgggttagcactagctgagaaacacttggctgcacgatttaacaagcctgacaatgagattgttgaccattacacatatgttatattgggtgatggttgtcaaatggagggaatttcaaatgaagcatgctcacttgccggtcactggggtctagggaagcttatngctttaatgatgac

SEQ ID NO: 3548 - DNA, 289 bp, Glycine max
  unsure (1)..(289): unsure at all n locations; Clone ID: 700557865H1
cttcntctatgggttggcttagtcggttcataactgccgtggctttcttagccatcggagtgatattctcaccggagacactggggtcaaaatcaaccacactttccacctacctcaaactcgtcacctcctctgcttctccaccggcttcggngccgtctgtgggtaacattcatnggcggcatcatcatgtntaanaatcngccgcngatcagnttgggaactgcaaagcnagatgnttccggcggatttctcgatggtgggtntctgtgcgccgtatcggtgcttc

SEQ ID NO: 3549 - DNA, 98 bp, Glycine max
  unsure (1)..(98): unsure at all n locations; Clone ID: 700557866H1
caaagaattcacaagggggaanntcaaaagggcggcaanntcaatgtcngaagaggaagaggttatatgaacagcaaatagagcagcttggaaatttc

SEQ ID NO: 3550 - DNA, 293 bp, Glycine max
  Clone ID: 700557867H1
atttcttagatatgtgatatacacaccgacatatcaccacctacaccactctgataaggacactaatttctgcctcttcatgcctctctttgattcacttggcaataccctcaacaaaaattcatggcaatcacacaaactactaagttcaggttcaggaaacggtgacatggtaccccattttgttttcctgggcacatatagttgatgtgtcatccagtatgcatgctcaattcgtctatagatcctttgcttcattgccatacacaacaaggttcttcttgctcccaggc

SEQ ID NO: 3551 - DNA, 294 bp, Glycine max
  unsure (1)..(294): unsure at all n locations; Clone ID: 700557868H1
gcaatggctatgagatcgtgggtnnngtcgaggaggatccatgactcgtttgatggactcaacaaatcgaggggctttgagtcggttcttgagcgacaagggtcgcattctcagcgaggaggaacaggccaaagagaatgtctacatccagaaatgggagagggagaggttggagaaacagaagcgactgtctgagaaggccaaggctctcacggacaaagatgcttctgctgctgctcataagaaacctgaaggtgctccaaaaggactgagtttatctttcacacaacccgc

SEQ ID NO: 3552 - DNA, 292 bp, Glycine max
  Clone ID: 700557869H1
gtacactttgaaagggttcacgaagaaacaccaatccgctccgagttgtatgttttgcagagctagaagaaatcaacgatgcctcgctatgatgataaatatggtaatacccgcctctatgttggacgcttgtcttcgaggactcgttcccgtgacctggagcgtgtcttcagcagatatggaagagttcgaggcgtagatatgaagaatgatttcgcctttgttgaatttagtgatcctcgagatgctgatgatgctagatacaacctggatggtcgtgatgttgaaggaa

SEQ ID NO: 3553 - DNA, 292 bp, Glycine max
  Clone ID: 700557870H1
cagcttcgggcattgggcaaggaaggaatccgtccaagttggattcagatcgactttctcttcattcttctaggtttttgaaaactaatccccatgcaagtgaaatccatattccaaggaatatatcttgccctgtttcacccattggaagcccacttttgaggccaagatcaccacaacacatgaatgggcgaatgtctccctctcctatatctagccctcggactgcttctggtgcatccacgcctcttaatggtggtagcggtgcattccatttagtaatcattagttc

SEQ ID NO: 3554 - DNA, 282 bp, Glycine max
  unsure (1)..(282): unsure at all n locations; Clone ID: 700557871H1
acctctttccaaagtccaaattttctagttccaccaaaccaaaccaaaccaaaatggcagcagcctcagcctcatccatgatatcaacaccagccttatctccaaccatccaaaagcaccatcatttgaagccatccaacgtgtgcttccaaggtcttagacncctcgcaaggttcaccaaagcctcatcaaccaaagtgagcaccaccaccaaaagggttattccaaagggtggtgttagagctgaatcaatcagcccttgtgataagctcagcactggct

SEQ ID NO: 3555 - DNA, 119 bp, Glycine max
  Clone ID: 700557872H1
ctcatcacttactggaagccttgttgtgagtaagagaaaaggcttcctgcaccgagcacaccaacttgatacctctgattctttctttgcttagaattccacagaatatggagaccgtc

SEQ ID NO: 3556 - DNA, 94 bp, Glycine max
  unsure (1)..(94): unsure at all n locations; Clone ID: 700557874H1
tgtgaatatggttagctaaatttgaaagaacttttattgtgtttaatgaaattnnaccggcatttataaagagaaatgtcattttctagccctt

SEQ ID NO: 3557 - DNA, 288 bp, Glycine max
  unsure (1)..(288): unsure at all n locations; Clone ID: 700557875H1
tttttacttatttttcattgataatttattagaaaataaatattcaacagatactaattagataacccttttttttaatacaagtcatcttcctaccttatttatgagcaccagaacaattcctttatgcagaaaacacctggcgatactctattgggtcacaaaaggcaccagtcactgtcataaaacgnnaaaccccacgatatttcgcacgctaactcgccatatccgcaacccaatatatcgtcacatgtaaattcatgtggaccccacacancttnatcnngt

SEQ ID NO: 3558 - DNA, 292 bp, Glycine max
  unsure (1)..(292): unsure at all n locations; Clone ID: 700557876H1
cnaacacaaaatataccactcttcaattcacaaaaaaacacacaaacctcttcagttcacaaaccatacaacctcttctantattcgttttctgatctacgcaaggttaaggttaatttgcttctatctacatggacattaacgagatcgatgttccttcattctttctctgccccatttcgttagaaatcatgaaggatccagtgacggtctcaacaggcatccacctacgaccgtgaaagcatcgaaacatggctgttctcgaaganaaacacgacatgccccatgaccc

SEQ ID NO: 3559 - DNA, 283 bp, Glycine max
  unsure (1)..(283): unsure at all n locations; Clone ID: 700557877H1
cttccatcaaagctctgtcaattganaagggcaacggtacgcagctcaaggacattcctaatgtggctttcacgttatcaaagagaaaagctgatgacaacctgcatgcacttcatagtatattgtttgggaaaaaagcaaaggtacatcatctaaagagaaatataggtctgttttctggctatgtgtggactgagaatgaggaaaaacagagggtgaagataaggagagntgaccaatgtgtgaagaanagttggtggctccgtaatgtgctaaatatncc

SEQ ID NO: 3560 - DNA, 288 bp, Glycine max
  unsure (1)..(288): unsure at all n locations; Clone ID: 700557878H1
ctantttctctctttctagttannggttcttcgtcgcaaatccgaagtaggatctctcttgttttttctctaggtttttcgcgatggcgtcgaagcgaattttgaaggagcttaaggatttgcagaaggatcctccaacatcttgcagtgccggtcctgttcatgaagatatgtttcattggcaagctacaattatgggtcctccagacagtccctatgctggaggtgttttcctagtgactattcattccctccagattatccctttaagccacccaagttgcatca

SEQ ID NO: 3561 - DNA, 289 bp, Glycine max
  unsure (1)..(289): unsure at all n locations; Clone ID: 700557881H1
ccacaacaaactcacaaaatggataagcaaattttgtntcttcttccccttctcatcatgtccctcttcactgtttcaatagccgctgaatcttcnagctcatgccccatggatntcaactatgttgagacctntccatgggactcttcatcctgcagagacccttctgacaagaaccactgctgncaagtcttgctaagtgtaattggcataggactttcccaacatctcaaacaaacttccttgtttcaattcccangaaaccatttcctcnattgcttatccattt

SEQ ID NO: 3562 - DNA, 291 bp, Glycine max
  Clone ID: 700557882H1
cttcttctatgggttggcttagtcggttcataactgccgtggctttcttagccatcggagtgatattctcaccggagacactggggtcaaaatcaaccacactttccacctacctcaaactcgctcacctcctctgcttctccaccgccttcggcgccgctctgtgggtaacattcatcggcggcatcatcatgtttaaaaatctgccgcggcatcagtttgggaacctgcaaagcaagatgtttccggcgtatttctcgatggtgggtgtctgctgcgccgtatcggtgg

SEQ ID NO: 3563 - DNA, 288 bp, Glycine max
  unsure (1)..(288): unsure at all n locations; Clone ID: 700557883H1
gaactgaactcttggggaacgnaattccacccactcatcaatggcatctactctcttcgcttgcccgtccgttgtgttcctcctcttcttctatattttctacttccgtcaaattctccttaaacccgaataaaatttctcttccgttcgccggaaacaaaaaacctctttcggctccaattcgaaggcggttcaatgtcattgctatggctccccctaaacccggtgggaaggccaagaaagtggttggaatataaagctggctcttgaagctgggaaggctacacc

SEQ ID NO: 3564 - DNA, 289 bp, Glycine max
  unsure (1)..(289): unsure at all n locations; Clone ID: 700557884H1
tccgccttggccaaatccctagcctcttgttgtttgattgagatgacgatggcgttgttagcgggtcagagctccatttccgcgcttccctttgttaacccaacttccttgagcttcaaacctctcgcctttaccaaatccctagctctcccttcagcacagaggccaacttcgctgaggctgaaatgcaagatggagagcgacggcgacattctgcgggggancactcgcacggngacgacgctgatgggactngccgtgttgctgatgaagaaggcggcnattccag

SEQ ID NO: 3565 - DNA, 291 bp, Glycine max
  unsure (1)..(291): unsure at all n locations; Clone ID: 700557885H1
gtctcaacaacccagttgagtaactaagatggcgcaagtnaggnacaagcaagtgcttctaaaggactatgttaccggttttcccaaagaatccgacatgaatattgtcgaaagtaccataacattgaagcttccacaaggttccaatgatgtcttgctcaaaaatttgtacttgtcttgtgatccgtatatgaggaatctcatggaacaagcccgaaggccctccccaatagtcgtgcttacactcctggctctccattaataggatatggtgtgtctaaagtctggatc

SEQ ID NO: 3566 - DNA, 292 bp, Glycine max
  unsure (1)..(292): unsure at all n locations; Clone ID: 700557886H1
atggaattatatctgtcgaatctgcaactctactggaagaggaagaagaaattgaggttccagtttacaaagaacctgcaggagaaaattccaagatggaaactgatgaannnnnnnnnnnnnnnnnnnnnnnnnnnnnnnnnnnnagcaccaatgacaatgatgttagcatgcaagatgctaataccaaggcaactgctaatgcccctggagccgaaaatggtacccctgaggcaggagataagcctgtgcagatggatactgataccaaggttgaggctccaaagaagaa

SEQ ID NO: 3567 - DNA, 284 bp, Glycine max
  unsure (1)..(284): unsure at all n locations; Clone ID: 700557887H1
gatccccctgtnggttgcaccgacgaccgaccctgatcttctgtgaagggttcgagtgagagcatacctgtcgggacccgaaagatggtgaactatgcctgagcggggngaaccagaggaaactctggtggaggncccgcagcgatactgacgtgcaaatcgntcgtctgacttgggtataggggcgaangattaatcganncgtctagtagtggttccctccgaatttccntcaggatagctggacccgcgggnagttcaatcgggtaaagccatgatagagg

SEQ ID NO: 3568 - DNA, 288 bp, Glycine max
  Clone ID: 700557888H1
cacaaggcagaaagcaagctcatcctagagttttaaaaatggcagcagcctcctccatggctctctcttccccatccttggctggcaaggccgtgaagctgggcccatcagcccccgaagtcgggagggtcagcatgaggaagaccgtcaccaagcaggcctcctccggaagcccatggtacggcccagaccgcgtcaagtacttgggcccattctctggcgagcccccgtcctacctcactggcgattcccaggtgactaggctgggacatagtgggtttcggccgg

SEQ ID NO: 3569 - DNA, 108 bp, Glycine max
  unsure (1)..(108): unsure at all n locations; Clone ID: 700557889H1
tgagtcggtatcaacgagtgaccgagtcgaaaagcgagtcaccactccccgcganncatggaccctctcgaagctttggtcgcccaaatccaagggctatcgagctct

SEQ ID NO: 3570 - DNA, 285 bp, Glycine max
  unsure (1)..(285): unsure at all n locations; Clone ID: 700557890H1
gaacaagtagttgagaactaagaaggagaagcaaatggcttcctcaatgatctcttccccagctgttaccactgtccaaccgtgccggtgccggcatggttgctccattcactggcctcaagtccatggctggcttccccaccagaaagaccaacaatgacattacctccattgctagcaacggtggaagagtgcaatgcatgcaggtgtggccancagttggcaagaagaagtttgagactctttccgcantgccagacttgtgatgcacattggcaagggant

SEQ ID NO: 3571 - DNA, 264 bp, Glycine max
  unsure (1)..(264): unsure at all n locations; Clone ID: 700557891H1
attcctcactaggagctcctctccactggttcttcatctgnntgcacacagttgcatagttntggaaaccaagaattcctgaagaagggtagcatcaacaagcagttctgaaaatggagatcaccaatgtcagtgagtatgaggctattgcaaagcagaagttgccaaagatggcgtttgactactacgcatctggtgcagaggaccagtggactctgcaagagaacagaaatgccttttccagaattttgtttcggccagtat

SEQ ID NO: 3572 - DNA, 285 bp, Glycine max
  unsure (1)..(285): unsure at all n locations; Clone ID: 700557892H1
ctgtcattgatgacatgtatgatgcctatggaaccattgacgaacttgagcttttcaccaatgcaattgagaggtgggatatttgttgcttggatgatctcccagaatacatgcatagtatgttatatagaaattttgaatgtcatgaaganntagagganagatgagagtacanggngagtatattgcatcangtatgcctaagnngngatgngaagatcaancanggccnccatggntgangcagctggcctccattcaatccatacaccggtcattggngng

SEQ ID NO: 3573 - DNA, 287 bp, Glycine max
  unsure (1)..(287): unsure at all n locations; Clone ID: 700557893H1
cttggtgtgaaacagatgatttgctgctgtaacaaaatggatgctactacacccaagtattccaaggccaggtatgatgaaattgtgaaggaagtctcttcctacttgaagaaagtaggatacaaccctgacaagattccttttgttcctatctctggttttgagggagacaacatgattgagaggtccacaaaccttgactggtacaagggtccaactctgcttgatgcacttgaccagattagtgagcccaagaggccctctgacangcccctcaggnttccctt

SEQ ID NO: 3574 - DNA, 283 bp, Glycine max
  Clone ID: 700557894H1
tggccacctggcttaggccatttctccaaacaagccttttttgttcaatgcacagatttctacaaaagtgaatgcaacatgtattgcttggattgtatgaatggagccctttgttcagcctgtcttgcttgtcacaaagaacacaaagctattcaggtaaaaactttgggttaaaattttgttaactaataactaattgtctttgaggatctgactcattttgatgcaattttgtggggatttaaactcccaaaaggccaaactaaggatttggatgcctgta

SEQ ID NO: 3575 - DNA, 285 bp, Glycine max
  Clone ID: 700557895H1
aatttcccgaaggaggaggaggttctgatcttctttcttttttgtctggttccctttcttccttcaaccaatttcgagatccgaaaccggcatcagatccgatccgaaatgtacggattcgaagctctcaccttcaacatccacggcggcttcctagaggccatcgtccgcggccaccgcgccggcctcctcaccaccgccgattacaacaacctctgccaatgcgaaaccctcgacgacatcaagatgcacctctccgccaccgagtacggtccttacctccaa

SEQ ID NO: 3576 - DNA, 279 bp, Glycine max
  unsure (1)..(279): unsure at all n locations; Clone ID: 700557896H1
tcttttttgacttccagactcaaatctaaanccaaaaaaaacaaaacaaacatttgtctccatcaaaaagcactgcccttacgtggtgccttcccctgccacttttnttctttagcatccaaccggaaaaaaaaaatagtactctnacagtctcactnacttgcccccttttgtctatggcacaagatggtgtcttaaaactgtgtgatcctatttgcattgaaaaagttgcaaccttttngttgtgatttccnctgatcagcaacatgggttaaggng

SEQ ID NO: 3577 - DNA, 295 bp, Glycine max
  unsure (1)..(295): unsure at all n locations; Clone ID: 700558301H1
cttcttcncctctctcgtgttatccgntttagttttctcgggaaaatcatggtganaggtccaggtctctactactgacatcggcaagaganctcgcgatcttctgttcaaggattatcagactgaccacaagttcaccatcaccacttacacttccactggantggaaatcacttcaactggagtcanganaggtgnaatatntttggccgatgtcagcactanggtgaagnncaagancatcacnntgatgtcaaagtggncactaactcanatctgcgtacaaccattatgt

SEQ ID NO: 3578 - DNA, 113 bp, Glycine max
  unsure (1)..(113): unsure at all n locations; Clone ID: 700558302H1
taaacaaaggaaagaaaaaaaaccctnagctcancatcaaccattcntggtccacctgctgcatattgcaggcaatcngtcattacntcnggtccaaantggctcctgaagca

SEQ ID NO: 3579 - DNA, 285 bp, Glycine max
  Clone ID: 700558303H1
atcatgatgggcttgcttctgtatttgagcaaattgaaagagtgatcactgcattacatcaagacaagaaattcatctctatcatgatagatgatatatcctttcttgaagttgctgctaatggctcttccaatgatgttttaaacttggtgcattattgccatacgttaacatctgattcagaatatggttgtgcatttattgcactcgaccataaggacattatttgaacggagacaggactgctgttatgttagagatggagttcctgctgacattttggtc

SEQ ID NO: 3580 - DNA, 196 bp, Glycine max
  Clone ID: 700558304H1
ctactcccacctaggattccgaccgccaccaacgttacccgctgctctgctttgccttctctgcctcctcgcggcaccaacactaaaaccacttagctcttatcttccctcaaccacttctcagtgtcccgaaaatcttctctgcttcagaccagagcttcttcagaggaatcatcctcagtagatgccaatgagg

SEQ ID NO: 3581 - DNA, 283 bp, Glycine max
  unsure (1)..(283): unsure at all n locations; Clone ID: 700558305H1
cacaaactgcaaccatggctactaccttatgttacaattctcttaacccttcaacaaccgttttctcaagaacccatttctcagttcccttgaataaagagcttccactggatgnttcaccncttgttgntggctataactgtggtgtaggatgcagaacaaggaagcaaaggaagaaagtnatgcatgtgaagtgtgcagtggtggaggctccaccaggtgtttcaccctcagcaaaagatgggnatgnaaccaccccttcgnagaagcagcttcgtatatt

SEQ ID NO: 3582 - DNA, 282 bp, Glycine max
  Clone ID: 700558306H1
caaaatacaacaagttcttacaggcaagtggatcactggatctggatgtgacttctcctaaacaactcaaccgaaggctctttctgaaacagctagctgtggacttgtgtactagtgagcgaaggatattatttcgtgctcaatacatactgcgaagaaaactgagggacatgagggctggtgaattaagggccctaaaaatattcaacggtttccggaatcttttccaatgaggccattcactggtgcattattttctgccctggtttgcccttggttgtt

SEQ ID NO: 3583 - DNA, 282 bp, Glycine max
  Clone ID: 700558307H1
atttcctctcaaaccctaaccctaactctaaccctccccgtcacaaaagaaaaccctctttgtccgatcatcgtcgtcaagatgttggaactccgtctcgtgcaaggctccctcctgaagaaggttttggaatccgtcaaggagctcgtgaacgacgcgaacttcgactgctcctccaccgggttctccctccaggccatggactccagccacgtcgccctcgtcgctctcctcctccgatccgagggcttcgagcactaccgctgcgaccgcaacatctcc

SEQ ID NO: 3584 - DNA, 272 bp, Glycine max
  unsure (1)..(272): unsure at all n locations; Clone ID: 700558308H1
cgcantgcaacgacgtggagttcatcctggtgatgggcgacgagtcgganaagacgaaggagctcctgaagcgggagaaggtggagaatgtgcctcacttcagcttctacaagagcaaggagaagatacacgaggaggaagggattggtcccgacatgctggtaggggatgtgctatactacggggacaaccactctggtgtggtgcagctgcacaacgtggaggacgtgcagaagctcatagaggaccacaagctggatcacaagctcatc

SEQ ID NO: 3585 - DNA, 278 bp, Glycine max
  unsure (1)..(278): unsure at all n locations; Clone ID: 700558309H1
tgcagccanagagcatatctattatcggctggtccagttccttgtcataattcttgnaatacttgtgatagttggttngctggaattcactaaattcagattcatggatatnngtactagcctgttggngttcatacccacaggctggggtctgatatcgattgcccaagtattccggccattttngcagtccactatcatntgggatggtgttgtntcagtggcccgnanatatganatnatgnttggagtcatatcatgtcncctgtggcatacta

SEQ ID NO: 3586 - DNA, 274 bp, Glycine max
  unsure (1)..(274): unsure at all n locations; Clone ID: 700558310H1
gttcatgggatggcagttatagatggcatggagtggaatgtgattttcaacaatgcgttaattgatgcttatgggaaatgcagggaacccaatttgtggttttctgtgttttgttggatgccaganagaaatgcggtgtcttcgacatcaatggttgtggcttagactagagcatgtagattggttgaggctgtagggtatttaaggacatgccggttaagaatacggtttctggactgcttgataccgggttttgtgagaaatggacgttgta

SEQ ID NO: 3587 - DNA, 275 bp, Glycine max
  unsure (1)..(275): unsure at all n locations; Clone ID: 700558311H1
cgaaaacgacgacgacagcgattgcntcgaaatcgcgccggaatccgctaatttccgcgacaatctcaacntcnctcgaggacgctgacgtggacgacgaaccggtacnggcgtcccgnggccggaggttcgtaatnnnnnnnnnnnnnnnnnnnnnnngtgaggaggagaacgggggaagggatggacacgtggcggaattgtatgatgttgagtcgagcgaggaggaagaggaagacgttgatgattgaacgagaacgacgttgttggaaggc

SEQ ID NO: 3588 - DNA, 279 bp, Glycine max
  unsure (1)..(279): unsure at all n locations; Clone ID: 700558312H1
cacaaggcagaaagcaagctcatcctagagttttaaaaatggcagcagcctcctccatggctctctcttccccatccttggctggcaaggccgtgaagctgggcccatcagcccccgaagtcgggagggtcagcatgaggaagaccgtcaccaagcaggcctcctccggaagcccatggtacggcccagaccgcgtcaagtacttgggcccattctctggcgagcccccgtcctacctcactggcgagttcccaggtgactacggctgggacatngctg

SEQ ID NO: 3589 - DNA, 278 bp, Glycine max
  Clone ID: 700558313H1
gaaattgtgaaggaagtttcttcctatttgaagaaagtaggatacaaccctgacaagattccttttgttcctatatctggttttgagggagacaacatgattgagaggtccacaaaccttgactggtacaagggtcctactctgctagatgcacttgaccagatctctgagcccaagaggccttctgacaagcccctcaggctaccccttcaggatgtgtacaagattggaggaattggaactgtgcctgtgggacgggttgagactggtgtctgaag

SEQ ID NO: 3590 - DNA, 281 bp, Glycine max
  unsure (1)..(281): unsure at all n locations; Clone ID: 700558314H1
ctgcaataacataagtacaaaacaacataacatcctcaagcctttgaacatcgttttgcagccatggaaacaggcatagcatgctacactcgcgggcctttcctgcctagtgtttcttccaagcactctccaccctccatctctccatcttttggcttgaggagtctgaaatcgagctctttatttggagaatctctaagagtggcatccaaatcaacactaaaggtttcaaagacaaagaatacttcactcgtgaccagangtgaattggtgacagtctg

SEQ ID NO: 3591 - DNA, 285 bp, Glycine max
  unsure (1)..(285): unsure at all n locations; Clone ID: 700558315H1
aaaaagagcatctgcaaaagataaggagacactcactgccattcctactcttacaaaccttcttcagaacttcaactcttcgatctcctccactttgcgcatcgtannnnnnnnnnnnnnnnnnnnnnnnnnnnnnnnnnnaactcaacatcaaaacaatatcaattctaataataactcattgcacacgtcaaatgaatagaagaagataattttgcaatatcacgtgattttgaagatgaatatcgatcgatatcgtgtccggtactactatttcagctttac

SEQ ID NO: 3592 - DNA, 289 bp, Glycine max
  Clone ID: 700558316H1
tgctggtttaacacaatctttatctcggagtggggtgttttctcatctcaaggaattgagtatcgagaaatgccatcagatagagaagttgctgacgccagggttagtgccacaacttcaaaacctggcgtctatatcggtagaggactgcgaatcaataaaggagatatttgcgggagatagttccgacaacattgcacttcccaatttaaccaaattgcaactacgctatttaccagaattacagacagtgtgcaaaggaattttactctgtaactctgagtatata

SEQ ID NO: 3593 - DNA, 277 bp, Glycine max
  unsure (1)..(277): unsure at all n locations; Clone ID: 700558317H1
caaattgtaaatataccatatagtggtgaatgcctaattcaagggaagaacaaaatctggattggcatatctcgtgctgtgggttccaagtgtgaaagatgctggaattattcagagcaggttggttcatttttggaccaccctaccctctgcanccgctgccacgatgttgttgctgttcagatgccccctcaagtagcagcagtcagttaaattttagaagcaaagtttgaattccaaaatatcatttttgttcactactgtctggcntatgtat

SEQ ID NO: 3594 - DNA, 279 bp, Glycine max
  unsure (1)..(279): unsure at all n locations; Clone ID: 700558318H1
cnaattggtaatggatcaagtgggcctcaaaatgtgaatgttgcccttagtgttgacaaccagtgggtcaacggaggacaagttgaggttgctgatgacaggtggcatganattggtgggtccttagaattgaaaagcagccatctaaggttatggtttatattcaaggtccngcttctgttgttgnctaatgctgctggacttcaaatttntgctgttgatagacatgcaaggtttanatattaaggagacagacagacaagatccgtaagcgggaga

SEQ ID NO: 3595 - DNA, 281 bp, Glycine max
  unsure (1)..(281): unsure at all n locations; Clone ID: 700558319H1
aaattgctttcgttcattagtatttagtttttcacaagctagggaagacatgggagaagtggctgatgaaggtcaatatntcagatcagaaatagctctattgaattactcggatgcaaccttcaaacccccactttcttctctgttgatacacattgatccactcataatacccaatggccacacttgttctgcatcagaatctgatccatcacccacttctcagcaccatcagcaggagcngcatcccaaagatgcctggcttccaatcatgaatcang

SEQ ID NO: 3596 - DNA, 280 bp, Glycine max
  unsure (1)..(280): unsure at all n locations; Clone ID: 700558320H1
ctctttctttctcttcctatctgtctcacggtcaatatnagaanaaaaaaacttcaatctttaacaatccatcacacaacaaaacacccacacttctggtttgttttgttttgtttaaattattttgagagagtnnnnnnnnnnnnnnnnnnnnnnnnnnnnnccaatggcttccgcaactgccccaagattcatcaagtgcgtgaccgttggtgatggagctgtagggaagacctgcatgctcatttgctataccagcaacaaattccccacggactat

SEQ ID NO: 3597 - DNA, 230 bp, Glycine max
  unsure (1)..(230): unsure at all n locations; Clone ID: 700558321H1
anaaaaacaagtagttgagaactaagaagaaggaaatggcttcctcaatgatctcctccccagctgttaccaccgtacaaccgtgccggtgccggcatggttgctccattcaccggcctcaaatccatggctggcttccccacgaggaagaccaacaatgacattacctccattgctagcaacggtggaagagtacaatgcatgcaggtgangncaccaattggnnnnac

SEQ ID NO: 3598 - DNA, 278 bp, Glycine max
  Clone ID: 700558322H1
atttctatagttaaagagttgcccaaagagttcgcctggagcacaagggagtattatggcttggctattcgagaaaccagaatcaaggctgcacctgtgcatgcatcagcctactggtatctggagaatgttttgcctgtcctacagagttatggtattgctgcaatctctccattttctcaccgactgagttttgacaacttgcctgtggatattcaacacctacgttgtaaagtaaacttccaagctttaaccttgtttctcatatcagaacactt

SEQ ID NO: 3599 - DNA, 278 bp, Glycine max
  Clone ID: 700558324H1
ggcttatttgagaacaattacaggaaagactgaggcccttgtggacctaacagtgatagagatattgtcaaggcatgcttctgatgaggtctaccttggacagagggacaatccaaattggactgatgacacaaaggcaattcaagcctttaagaagtttggaaacaagctgaaggaaattgaggacaaaatctcagggaggaacaagaattcaagcctaggaaccgtaatggaccggcgcagatgccctacactgtgcttcttcctaccagtgggga

SEQ ID NO: 3600 - DNA, 214 bp, Glycine max
  unsure (1)..(214): unsure at all n locations; Clone ID: 700558325H1
cacagatcaattgcaacggttgaattttgactgaagacaaagttagaaaaaaaaaacatgnnctgctccgtcgcggtttccaattcgccggtgttctctccttcttcttccctcttctgctcgaagccctccatcatctcttcttcgccggaatccctctccctctctctgtcgcatctcaaaccttcgaactcttctacgtcgtcgtcttgtt

SEQ ID NO: 3601 - DNA, 276 bp, Glycine max
  Clone ID: 700558326H1
catggcgttggtgaatccgtttctgtctccccctcgaactcccctctctctgcgagtttcagctccgccaaaccaagcactactacgttggactctctgctcccaatattcattcaaaccatcatcactaagatcgaagcacgccatgtgtggcgccactgccgacatcaaggctgcacctttagctgatggagaagcagatcacgcggttcttgtgggccccgccagcgaggacgagagaaaaggagactatgactggacacaggaatggtaccc

SEQ ID NO: 3602 - DNA, 272 bp, Glycine max
  unsure (1)..(272): unsure at all n locations; Clone ID: 700558327H1
caccaccaccatgacccttcctcaatcatttggctgtggacttgtncaagcacccttggtgacaagctctggtcttcttactaaagtttggagtgttatctcttctcgtgatgaagacatagtttcatactcaggaaataatggactgtccttgaaagtttctgaggattcgggtttgacggttgttgcgtttgaggtcaacccggattttgatcttcaatctacagttgtttctttctctgatcccaaggagaataattgaaccgcttgag

SEQ ID NO: 3603 - DNA, 273 bp, Glycine max
  unsure (1)..(273): unsure at all n locations; Clone ID: 700558328H1
taaaaaataaacatatattgagaatggagggttgtgtgaagaagttgctatgccttgttgggtttgtggtgcttgtgagtactattggtggggtggagagtgctggtgaatgtgggaaatctacaacccctgataatgaggcttataagcttgcancatgtgcctcagcagcacaagatgagaatgctagtgtttctcagagttgctgtgctcaggtgaagaaaattgggcagaaccctagttgcctctgtgcagttctctctctaacacagc

SEQ ID NO: 3604 - DNA, 276 bp, Glycine max
  unsure (1)..(276): unsure at all n locations; Clone ID: 700558329H1
atgcatctctgtatttaatgcttttaattattatatgcatctctgttcaaaattgttattttatagattggatggaggaagcatgtgaatttcgaagttgggctgaattgattcctgatgcgctcggggtaatcttcaccaatctttctcttcaggagagggtaacagtgatccccttgangtctatctctgccagcagtaaggtccagttactgctggcaagagatagacatcaaggattggagcaaccgatgccagcccgaccaactcgatcgg

SEQ ID NO: 3605 - DNA, 280 bp, Glycine max
  Clone ID: 700558330H1
aatcacgctcacgcacctgagtctctgagattgaatttgcaaattcatcttagaaccctaatcccctttttctcaatcgaacaaatcattccatcatccgggtgcaagagggaatgataagagaggcaagctgcaccggattattgccaaattgaagcctccaagactccaaattccttcagtgaataatctggttgaaatgagcaagtatggctgaaccttaggccggctaagccaaagaagcagccaccaagaccttccctctccaccccttttggct

SEQ ID NO: 3606 - DNA, 251 bp, Glycine max
  unsure (1)..(251): unsure at all n locations; Clone ID: 700558331H1
gttttgtgtgtgtcgaagtggatagttctncccttcaattaatctccgatccgaaaccgaatggggattctgtacgcgctggttggtcgtggatcggtggtgctggcggagttcagcggcaccaccaccaacgccagcgcaatcgcgcgttcagatccttgaaaaaatccccggcaacaacgacacgcagtttcttactctcaggatcgctacatcttccagttaaacgcacgatggactcacgntctctg

SEQ ID NO: 3607 - DNA, 284 bp, Glycine max
  Clone ID: 700558332H1
gcgagaaatggcgatggcaatggcgcttcgcaggctttcatcttcaattgacaagcctctgcgccctctcttcaatgccggttccctctactacaagtcgtctttgcctgatgaagctgtttacgacaaggagcgacccggagttacatggccgaagcagttgaatgctccacttgaggtcgtggatcctgagattgctgatattattgagcttgagaaagctaggcaatggaaggggctagaatgataccgtcagagaatttcactcgtgtctgtgatgcagg

SEQ ID NO: 3608 - DNA, 284 bp, Glycine max
  Clone ID: 700558334H1
ggctggttcaactgaggtgatggctttgaatttgccttctcccgcccaagtgaagcccttatttttctcttcaaataactccacaaaacttccaggtagcttttctttgaagagaaaagatagtgacacaacagtagagagacgagtttattgctctgccgctgctcaatcaccaccaccagcatggccaggaacagctattcccgagccttctgatttcaagacatgggatgggcaaaaacctatttctgtcttaggatctacgggttcaattggaatcagac

SEQ ID NO: 3609 - DNA, 272 bp, Glycine max
  unsure (1)..(272): unsure at all n locations; Clone ID: 700558335H1
aaacagtttcctggtggatgagacgccaataagggtgcacacgaacctggaacacaagggcattcccttcccgaaggaccaagccatgggcgtgtacagctctatctggaacgcggacgattgggccacgcagggtggtcgtgtgaagacagattggagccacgcacccttcgttgccacctacaaggacttccaaatcgacgcgtgcgcgtgccccgtgccggtgacgtcagcagatagtgctaanaactgtagcagcagcgaggataaga

SEQ ID NO: 3610 - DNA, 279 bp, Glycine max
  Clone ID: 700558336H1
ctcttttgctgcatcagaggagttgtaaattaagagcatggctgcacaagctgcttgtatcatgcatcttctcttaccttctcagcggaggctgcaagacaaagtcttggaccaagatcactccaatctccatttggcttctccagaaaagcctcctttcttgttaaggcagctgctaccccccctgtcaagcaaggatcagacagacctttgtggtttgcatcaaagcaaagtctttcttacttggatggcagccttccgggtgactatggattgacc

SEQ ID NO: 3611 - DNA, 278 bp, Glycine max
  Clone ID: 700558337H1
ttcaactctgcttcccctggcaaccttcttcttagttctctccgcttcttatctccagattgctggggcgaaagcacaaccgttgactagtctcaagcttaactctccgatccttcaggagtctattgctaaagagatcaatgaaaatcctgaggcaggatgggaggctgctataaatcctcatttctccaattatacagttgaacaatttaagcgccttcttggagtcaaaccaacgcctaagaaggaactgagaagtacacctgctatatctcacc

SEQ ID NO: 3612 - DNA, 281 bp, Glycine max
  unsure (1)..(281): unsure at all n locations; Clone ID: 700558338H1
gggtcacgtagcattacggctctctattattatntaaccgtgtgaactaacgaatcatattaccacnaattcanaacatnctcttnantcttnantttggtanttcanaagtatngctgggctttttttgtttgcnttaccatacanatttncaaactcttcanacanattcntccaagcgtcactggtnctaattccattntttgtaggccgnggatcttgaccaatntttgcnnggctntnnannatcaatctctgncctggtncatggccannggaca

SEQ ID NO: 3613 - DNA, 272 bp, Glycine max
  Clone ID: 700558340H1
tcatatgcaattgaacagctttctgaggcaatgtctgctagttcagattctgataaactgcctgatggggttccagctgatgcgttacgcctatgctcggagcagctctctgggagctacgattcaaagtttggtgggtttggatctgcaccaaagtttcccagaccagttgagataaacttgatgctatatcactccaaaaagttggaggatacggggaagttgggtgtagctaatggaagccagcaaatggttttcttagcttgcaatgc

SEQ ID NO: 3614 - DNA, 272 bp, Glycine max
  unsure (1)..(272): unsure at all n locations; Clone ID: 700558342H1
ttcagtacaaaatttgatggatcttctatccttaagagatgtagttccaatgccaattctaggaacgttgactcagaacgagccaggtttgattccaactggttaaaccgttggatggaattagataacaagagcagccaaactggagatgctcattgaaaaatggacgccctgatgatgataaaagtgacaagattctcgaagtggatacttggaggccacactcaagtctcaccacagtagcagctccttccaagcagcacntattattt

SEQ ID NO: 3615 - DNA, 266 bp, Glycine max
  Clone ID: 700558343H1
tgcaggagtacttgcagtatgctatggccttttccgtcttgccatggcaaaaggacttgcctgggtggtgtgtgtttatggagttccattgctagtggtcaatggatttttggtgttgattacattcttgcagcatactcaccctgcattgccacattacacttcctctgagtgggactggttgagaggagctttgcaacagtggatagagatatggaatcctgaacaaggtctccataatatacagacactcatgtagcacatca

SEQ ID NO: 3616 - DNA, 274 bp, Glycine max
  unsure (1)..(274): unsure at all n locations; Clone ID: 700558344H1
tagaagaataccccctcttttgctgcatcagaggagttgtaaattaagagcatggctgcacaagctcttgtatcatccatcttctcttaccttctcagcggaggctgcaagacaaagtcttggaccaagatcactccaatctccatttggcttcnccagaaaagcctcctttcttgttaaggcagctgctaccccccctgtcaagcaaggatcagacagacctttgtggtttgcatcaaagcaaagtctttcttacttggatggcagccttccg

SEQ ID NO: 3617 - DNA, 270 bp, Glycine max
  unsure (1)..(270): unsure at all n locations; Clone ID: 700558345H1
aaaaatttacacaaactagtgtccctccgacagcactttcttccttaataactccaaaaactttggtacctttcaatcaaccaccgaaaagttagggacnnnnnnnnnnnnnnnnnnnnnnnnnnnnngaagatgtgtgattgatcgattccctagtgaaggggtaaggggggtcatgtctttcggtgggttaagtattgctttgagtcttgtctttgggtgtcttctgctggctctgtgtgcncagcttactattctatggtggaagaa

SEQ ID NO: 3618 - DNA, 277 bp, Glycine max
  Clone ID: 700558346H1
ccttgatcagaaattcggtatcatcaagggtaccatgaccaccacttcactcctacaccggtgaccaaaggcttcttgatgcgagccaccgtgacctgaggcgtgcaagggcagcagcactcaacattgtccccacttcaacaggagcagcaaaggcagtggcccttgtcctcccaaccctcaaaggcaaactcaatggcattgcactccgtgtgccaacaccgaacgtctcagtggtggactcgtcgttcaggtctcaaagaagactttgcagaag

SEQ ID NO: 3619 - DNA, 271 bp, Glycine max
  unsure (1)..(271): unsure at all n locations; Clone ID: 700558347H1
caacaacccaccatagttttaaggccatttaattggttcttattgtgtttgtgagtgtgctataaatccttcgtggtttttggtgaccctttgggttctatagtgagtgcaaggtaacccactttggattggaaggttgtcgcaatggggaaggttgtgttgttgtttcttgcannnnnnnnnnnnnnnnntcttggctgtgctgattcaattgagaagcttgaggttcagaagcactgaagaactgaatagacctcctgttagtccatca

SEQ ID NO: 3620 - DNA, 276 bp, Glycine max
  Clone ID: 700558348H1
gaagtcttcaacaagatccaagactttgagaaacccaagttgagtcctattgtcaagttgttgggctctggacttgcaaatttagaaggcgagaaatggcgtacacatcgaaagattattaaccctgctttccatttagaaaaattgaaggttatgttaccaatatttctgaatgttgtgacgatatggtttccaaatgggaaaggttgttgtcttcaaatgacaaatccgaaattgatgtgtggccttcctcaaaattaacagtgatattatatc

SEQ ID NO: 3621 - DNA, 283 bp, Glycine max
  unsure (1)..(283): unsure at all n locations; Clone ID: 700558349H1
ggcaaatgccaaccctcttcagtcccagatgagttctctttactcccaaccttttgctcactacaacacacagccgcttaacatgcaggctacccaacagcagcctcaggctcagaactcccaaaatcaganaatccactataacggttgangaactttaggagcttaatgtggctttgatgggctatatagtctttgcaatcagcaactggggttgtgcctgtcttntgtgctgaaatacgtttgcatgagacatccgaaggattgccttgggatagctata

SEQ ID NO: 3622 - DNA, 274 bp, Glycine max
  unsure (1)..(274): unsure at all n locations; Clone ID: 700558351H1
ggaagttgagagggttcgtggtgaaagaaatgcagtggctaacaagatgaaagggaaactagaacagtctgagcgtcaaagattgattgaggaaggtaagaatttgaaggagggacttgctgctttggaagaagacttggcgaanttaatgatgagcttcaacaggaagcgcagtgtataccaaacatgactcatccagatgttccaataggaggggaggatgttccaccataaggaagatggttggtagctctcccaaatttagcttcctgtc

SEQ ID NO: 3623 - DNA, 276 bp, Glycine max
  unsure (1)..(276): unsure at all n locations; Clone ID: 700558352H1
aaaagccttagccttccatacaacntaanacaaaaagacatcntcatccatggctgcctccgtctccactgtacggaganntcaacaganctcttttgaacctgaatggttctggagctggagcttcagctcccagttcagccttctttgggaccagcttgaagaaggttattgcctcaagggtcnccaacagcaaggtttccggtggaagcttcaagattgttgctgtagaagagaaganagagattgaagagacccagnagaccganaaggaca

SEQ ID NO: 3624 - DNA, 274 bp, Glycine max
  unsure (1)..(274): unsure at all n locations; Clone ID: 700558353H1
ggtggtgcctctcttccatctccccagccaaancctctctcaagaaggccacattaggcccttctgtcttcgcaaccgttagcannnnnnnnnnnnnnnnnnnnnnnnnnnnnnnnnnnnnnnnnnnnctcattcaagacaggcctgtctttgctgcccctgcccccatcatcaccccaactgtgagagaggatatggcaaaggactacgagcaagctattgaagaactccagaaattgttgagggagangagtgaatcaaagccacagctgct

SEQ ID NO: 3625 - DNA, 272 bp, Glycine max
  Clone ID: 700558354H1
atgataagcaacaaggaacaactgtatcacctgatgagctcatttctcttgcacagcagtacagctccgagttccttcaatcagagcttgagaggacacgcattaacacagcatgctttgcagaatctattcctttggactctttgccagaaccagccaaatctgcctactctcccttcaggaactcaatggattctcctagcagaaaacacagaggtacctacaataccggagcctcaagtttctctcgccatagacattgatgggtatga

SEQ ID NO: 3626 - DNA, 271 bp, Glycine max
  unsure (1)..(271): unsure at all n locations; Clone ID: 700558355H1
cagatatatgatatttacccagagaaaatntctccttgttatggttgaatccaattgggccaagttaaggagtctgattctgatattttccaggccccactgattgctttttattttttataggtactttcactctgtccaatctgggaatgtttggtgttgatcgctttgatgctatnctgccacctggaactggagcaataatggctgttggagcatcggagcccactgttgtggctacaaaggatggtcgcattggaatgaagaacca

SEQ ID NO: 3627 - DNA, 275 bp, Glycine max
  unsure (1)..(275): unsure at all n locations; Clone ID: 700558356H1
gtgcattggtccattatctatcgttaatggaagtggaagtagcacttccattttccattttgcatttctcagtagagtaggcaaagccaaatccaaagggaacacgttcattcaattgcaattatttatattaattaataataattcacaaattgtgtgtggccagcactccaatcccctccctcaactanacgacaaattttccattcccggcatctcctcccagcntcgtaccccagataccttaaattcgcttcataacacaatttcgtttc

SEQ ID NO: 3628 - DNA, 269 bp, Glycine max
  unsure (1)..(269): unsure at all n locations; Clone ID: 700558357H1
agaaactacaattctcactgaaagaaagttgctaactcttggcaccagttatcagnttaacatagttgataacaccaaaggcacaacaacattgaggnaatgaggcttgtcatatcagctgtatgtgttattgtgctattttcttatgctgctgcgtatgatcctttggatccaaatggaaacataacgatcaaatgggatgttgtgtcatggacaccagatggctatgtaagcgtggtaaccatgagccatttccaatgtttcggcac

SEQ ID NO: 3629 - DNA, 272 bp, Glycine max
  Clone ID: 700558358H1
ccaaacttcttcttggaatgtcccttccttaatacccctcaaagaaaagccaccttaacatctcttctctgaaaattctctttagagagatagagagaggaagaaagaatggcagcttgcactgtctactcaacacaatctctgagcacaaattgctccatctcaaccccatcaaagacgcaactcagttttttccaccaaaagcaggtagttttctggaggaacagcaagaagggcagctgcagcagcagaagaagctatgtgataacatg

SEQ ID NO: 3630 - DNA, 271 bp, Glycine max
  unsure (1)..(271): unsure at all n locations; Clone ID: 700558359H1
ttctcagctcactaacaccagctactactccctccccccaccccccactctctcacaaaatgtgccagggcctctccgccccatcgccgccgtgttcggcgcttctctccttcacgnnnnnnnnnnnnnnnnnntcggtggtgggcccggtttcggcatggcggccttggccccagagcaacaaaatgaacatcagcgattatgccttcggggactccaagaaatacgaggggtcctcggagttcgtgaagctgaggtaccacatgggacc

SEQ ID NO: 3631 - DNA, 271 bp, Glycine max
  unsure (1)..(271): unsure at all n locations; Clone ID: 700558360H1
cacatagccctcttctaatcccttctcacaaactcaaaaaacccttacactcatttcccttaatggattcgagtacaacaacctccacagacagtgaagtagcctatgacatcccacccatcctcaaagtctacaaaaacggtcgcatagagaggctagnaggcgtcgaggttgctcctccgggtctcgatcctgaaaccaacgtggaatcgaaagacatcgtaatctccgaaaaagacggcttatccgccaggctttacattcccaaaac

SEQ ID NO: 3632 - DNA, 261 bp, Glycine max
  unsure (1)..(261): unsure at all n locations; Clone ID: 700558361H1
gtctggttaattttattatagtttatgctctgttttnccttgcattgatgaatcaggacagagcagtaaggaaggaccacagctacttccttcttttaacttgcaaaatatgattctgcatactgtttaaagtaacacattaattatgtgaccttctcggtctaaggaagtaacaactcataaaggtttctacatacctcacgtgtttttattcatgggtgagataataagtagcaattgacatatcaaaccaacaatttt

SEQ ID NO: 3633 - DNA, 273 bp, Glycine max
  unsure (1)..(273): unsure at all n locations; Clone ID: 700558362H1
catgaattatgaaagcagggttgttttttctggtgttagtgttagctctatgtatccatgcttcctctgtgtggattttcattttatcttctcctccttaattttccaacaaaatctcaaacataaataaattaaaaaataacatttttatttacaattaataaagatatcgggattcatcttgttcntattttgccccctttttcttctggtctcccgaatcagaaaccctaatcagtgtttgggattcagataaagaaattaaacagatga

SEQ ID NO: 3634 - DNA, 276 bp, Glycine max
  Clone ID: 700558363H1
atccacttatcctcaatggtcagttgctaattggaaattgcattgcgcaaaccttaagcagtgttgcaaatgatttgttgagctcggtgcatctcacagtaaaaaaaatccgggatagtgtaaaatatgtgaagacttcagagtcacatgaggaaaaattcctggatctcaagcagcaacttcaggtccctagtgaaaggaaccttttattgacgaccaaaccaagtggaatacaacatatcagatgctggtggcagctctgaactacaggaagtg

SEQ ID NO: 3635 - DNA, 283 bp, Glycine max
  unsure (1)..(283): unsure at all n locations; Clone ID: 700558364H1
ccggnactccatctttctatcagagcactgattaatgagacatttattnntaagtntcccatattcataatnccagtaaaaaccggnttgtcgaagaaaaggaaagatttgctctggaatttgttcntccccttgntacgtgggnaccaactcgtntgatatgnnatttccgatctnctnccccattccaaacatgttctgaggcaggttaggttgcgtnnagaatacatcannntcaatggggccagacttaattttaatatgtganggacatgaggtgaag

SEQ ID NO: 3636 - DNA, 275 bp, Glycine max
  unsure (1)..(275): unsure at all n locations; Clone ID: 700558366H1
actagttttgtttttggaacatatcgcattacatnacattagattggtggnanagcaatggcatcgtcactacaagcagcagctactttcatgcaacccaccaagtttttgcagctaaagtctactcaggccatatctaaggcttttggtttggaacctgntggagttantaaggtcacatgctcccttcaggctgatctaaggacttggctcacaagtgtgttgatgctaccaaaattgcaggctttgcccttgccanctctgctctcgttgtt

SEQ ID NO: 3637 - DNA, 271 bp, Glycine max
  unsure (1)..(271): unsure at all n locations; Clone ID: 700558367H1
ccacgttaaatccaaattgcagggacatacacaagctccgaacaagtttgcgtttaccttaaaaataaacgcacaacaagtaattcattaaaatatcacgttaggaataggaagtgacatttctagagcaacaactgattatngcntccgaccaagcagcaacaacagtccctttggattgttgggaggacaacgagaaaaaacgtgtagtctggcggangcaagtggagacttcatngatgtnctcttagtttcctcactcttccatggg

SEQ ID NO: 3638 - DNA, 270 bp, Glycine max
  unsure (1)..(270): unsure at all n locations; Clone ID: 700558368H1
gctacgtnttctcctctcccgttacncgaactccacttcctctctccgcnaacnacncccanacgccgtatctccttcctccaaactcggtcctacaccntactccgtnncccgtccacgtcacctccaangtctctctccgnacctcgcgaatccgcgcaantagagnngaatccgcgttggncgancgantcaacgacgtcgaatggaccggaaacggcgcagcgctgctgctgctgacggaaaggcgntccgttngtggatagttaa

SEQ ID NO: 3639 - DNA, 269 bp, Glycine max
  Clone ID: 700558370H1
tgctggtttaacacaatctttatctcggagtggggtgttttctcatctcaaggaattgagtatcgagaaatgccatcagatagagaagttgctgacgccagggttagtgccacaacttcaaaacctggcgtctatatcggtagaggactgcgaatcaataaaggagatatttgcgggagatagttccgacaacattgcacttcccaatttaaccaaattgcaactacgctatttaccagaattacagacagtgtgcaaaggattttact

SEQ ID NO: 3640 - DNA, 245 bp, Glycine max
  unsure (1)..(245): unsure at all n locations; Clone ID: 700558371H1
gntcaggagcttgtaaagaannttgactggcaaggacncaaatgtcactgtacancccagatgaagtggttgcccttggagctgcagttcaggctggtgtcttggctggagatgtcagtgatattgtgctgttggatgtcactccattatctttgggtctggaaactctaggtggtgtgatgacaaaaatattccaagaaacactactcttcccacctcaaagtccgaggttttctcaaccgctg

SEQ ID NO: 3641 - DNA, 269 bp, Glycine max
  Clone ID: 700558372H1
gttgtagtccctgctagcgcccaaatgtggaggaggcttgtcatctcccctgaatctcttccaaagctgaataagattgagcgaagtggattctcctccgtaatagtcgttcctatccatatgcagaaccttgaggccatcgacggagagaagaccgctgagaatgcactccttgagacccgtgcccaacacgatcacatcgtactcctcatccatgttcgatcgatctcgatctcaccgaaaacggggtttagggtttcccaacacaa

SEQ ID NO: 3642 - DNA, 266 bp, Glycine max
  Clone ID: 700558374H1
ctcacaccaggcgcacgttagcacaaactatcatggccacggcaacagcagctgccaccttcgtcctttatggggacgcgtctactggaggctcactccggagcggggcgagtgcacgcccgattcggcttcggcaagaaaaaggctcccgccccaaagaaagcctccaggggatcgggccgagacaccgacagacccctttggtatccgggcgccaaagcgccgaatacctcgatgggagtcttgtcggagatacgggttcgatc

SEQ ID NO: 3643 - DNA, 260 bp, Glycine max
  Clone ID: 700558375H1
cggagaatcgggtacagcaagaggatagagaggtggatggagattcagaagaacgatcggatctacgagctgggttctctgcccccgtttctgttggtgttcgcgggacacgtggcgccaattgagcacaggtggaaccagcatgggttgggtggcgataacgtgaaggggagttgccgggacctgcacgctgggcctgtgagtctttgcatggtccggtatggcaagccctggactcgatggactccaaacagccctgt

SEQ ID NO: 3644 - DNA, 123 bp, Glycine max
  Clone ID: 700558376H1
gtgagttgcaggcagtgtcatctctcctttgacgacaagatgagcatcccaattccccatcggcagttattcatagacggagactggaaagtccccgtcctcaagaatcggattcccatcatc

SEQ ID NO: 3645 - DNA, 265 bp, Glycine max
  Clone ID: 700558377H1
gtcgtgctctcgttttagtaggccactttctgctagttataagagtactttcccttcaatggcttatgaattccagaagccgacaatgtttgcaactgaatgaatgcacacgttggccttgtgtcatgaggtattgcaatcttttctctctatcacagtttcatttaattttttaatgctgcaacgtatgctgctgtataaaaatgaacttataattcaactagaattctcttattaaaccacacgtacataagatatgcaagtt

SEQ ID NO: 3646 - DNA, 269 bp, Glycine max
  unsure (1)..(269): unsure at all n locations; Clone ID: 700558378H1
aganaatgcaaagccatatttgagcagtttgatgaggattctaatggggcaatagatcaagaggagttgaaaaagtgtttcagtaagctggaaatttctttttccgaggaggaaataaatgatctttttgaagcatgtgatattaacgaggatatgggaatgaagttcaatgagtttattgtacttctttgtgttgtctaccttctcaagaatgaccctgcagctctcatgctaaatcacgaattgggatgccaaagctggagggcaca

SEQ ID NO: 3647 - DNA, 280 bp, Glycine max
  unsure (1)..(280): unsure at all n locations; Clone ID: 700558379H1
agttaaaccagatggctattctttaccagattttgaaaatgaaaaccccgaacattgtcttgataatgattttnctgttgttgataagggcatagaactttcatcaaacgaatctgttaaactagaggaatccatcataaaggcctcctgacgatgcttctaacagttgatagtggccagtaacccttggtatatncnggnatacaantantcttcctgnaagatngtgttaaccatgttttcctgnatgatgcaaatgatagtcctaaggntcaagcng

SEQ ID NO: 3648 - DNA, 267 bp, Glycine max
  unsure (1)..(267): unsure at all n locations; Clone ID: 700558380H1
ctagtttcttacaaggctctactctactgcttcaccttctgctcnagaaaattcagtggtgatacatggcttcggctactctctctgtagccaaaccagcccttcaggcaaatgggaaaggctctctgaattctctggcctccgcagctcatcaggcttcttccctttctagaaaatcttcagaggatttccatctgtcattgccttccagactatgcattggaagcatggaggatacaanaagggtgtgacgaggcaaactgangt

SEQ ID NO: 3649 - DNA, 161 bp, Glycine max
  unsure (1)..(161): unsure at all n locations; Clone ID: 700558382H1
ctcacancaggngcacgttagcacaaactatcatggccacggcnacagcagntgccacctcgtcctntatggggacgcgtctcctggaggctcnctncggnnccnngngagtnnacgnccgattcggcttcgnnaagaaaaaggctcccgcnccaaanaaa

SEQ ID NO: 3650 - DNA, 269 bp, Glycine max
  unsure (1)..(269): unsure at all n locations; Clone ID: 700558383H1
cgaaaatctagagcaaagtgantgattccagttccaatggccttgggcanccagcgncttgatcggaaggnangttcttgtctcatccgannccccaanacaacnangtcatcnnctccgctacaattccttttcaaganaagctnttaantgctcanaattcacaagctgctctagctgcccttanctnttcctncgcgagcntctctgtgancnnatnaggccttgnngctgataacgtnaatcctccccctgtaattgaagnccna

SEQ ID NO: 3651 - DNA, 268 bp, Glycine max
  unsure (1)..(268): unsure at all n locations; Clone ID: 700558384H1
gctggaacttacgacgtgagctcggcgaccggtggtcccttcggaaccataaagcacccctccgaactcgctncacggcgctaacaacggtcttgacatcgctgttaggcttttggagccactcaaagcggagtttcctattttgagctacgccganttctaccagttggctggcgttgttgccgttgaggtcaccggtggacctgaagttccctccatcctggaagagaggacaaacctgagccaccaccagagggtcgcttgcccg

SEQ ID NO: 3652 - DNA, 269 bp, Glycine max
  unsure (1)..(269): unsure at all n locations; Clone ID: 700558385H1
ctagaaacagtgtgatgaaaatgaaggtccttgttttcttcgttgctacaattttngtagcatggcaatgccatgcgtaacgatatgttccctctccgaatgaacactggctatggtgcccgtactccggaggtgaaatgcgcaagttggaggcttgctgtggaagcacacaacatctttggctttgagaccattcctgaagagtgcgttgaagcaacaaaggaatacatccatggcgaacaatatagatcagactccaaaacagttaa

SEQ ID NO: 3653 - DNA, 269 bp, Glycine max
  unsure (1)..(269): unsure at all n locations; Clone ID: 700558386H1
ttcttcttcttcatctacattagtagttcttgttattcattattcttcatactcacacagcttcttctgggggcaaaaggggtcatttttcagatccgaggttgagctcctctacccatcatgatggagctcggatacctgaatcagggtcagccttctagaggaacaacaccacttgtncactcttccattgttgctttcaacacttgtgttcttctccactttcacacatgccttctctccntctgtgtttccggaattgaatccta

SEQ ID NO: 3654 - DNA, 259 bp, Glycine max
  unsure (1)..(259): unsure at all n locations; Clone ID: 700558387H1
ctcaatggccacgcttagcttcggcatcgccacgacatgtctgagtgctgcacgctgattatcgtagaagaagcaactggaaatggagcagacccagaattgtgtgtgttggatgggacccggaaggcgtgcttggtccaccccaaactgggcacctcgccaggttcgagtttaagangcgcctcgagagagacgcagatgcccgcgaanctttccaacgtcaagtccgtgaagagaaagaacgccgtcaatcccttcg

SEQ ID NO: 3655 - DNA, 266 bp, Glycine max
  Clone ID: 700558389H1
cacagaattagggtcacgagggtttcatcctgcggcatcagacatgggaggaggcaatgggcaaaaggcaaagatggctcgcgagaagaacatcgagaagcagaaggccgcctcaaagggaagccagctggattcaaacaagaaagcaatgtcgatccagtgcaaggtgtgcatgcaaacatttatgtgcaccacatcggaagtgaagtgtagggagcatgctgaagccaaacaccctaaatctgatgtttatgcttgttttcctc

SEQ ID NO: 3656 - DNA, 215 bp, Glycine max
  Clone ID: 700558390H1
ctagggtttcacgtttaccatgtgaaaatgattgagaatctctctctcattctctctctattttatattttctttcacgtcaattagggttttttttgctggcgtgattctgaaggcttggatctggatatcttctttgcttctttgctatggaagactcggattcagttgctacactgatagattctactacttctaagatacaacagctgcag

SEQ ID NO: 3657 - DNA, 263 bp, Glycine max
  unsure (1)..(263): unsure at all n locations; Clone ID: 700558391H1
gaaagtagcaaagatgacaggtgggatgtttggaaggaaggggcaaaagataaaggggacagtggtgttgatgccaaagaatgtgttggacttcaacgccataacctccgtcggaaaaggcagtgctaaggacaccgccaccgatttcttgggcaaaggcttggacgcattaggtcatgcagttgatnctctcactgccttcgctggccatagcatctccttgcagcttatcatgctactcagactgatggtagtggaaaagg

SEQ ID NO: 3658 - DNA, 264 bp, Glycine max
  unsure (1)..(264): unsure at all n locations; Clone ID: 700558392H1
tctaaccttatggtgcattttgttgtctttgttgcaactatcactaggagctgtaaggcaccgtattaggtttaacgtagagtacatgtatcgtgagccagattgccatgagcacgttgtgatgggaatcaatggccagtttcctggcccaaccatcacagctgaagctggagacacccttgagattttactcaccaataagctctccacagagggaacagttattcactgnccatggattagacagtatggaacaccttgggc

SEQ ID NO: 3659 - DNA, 272 bp, Glycine max
  unsure (1)..(272): unsure at all n locations; Clone ID: 700558394H1
tctctctcttcgcttattgttgcaccttcctcgtaaaagataactcccggtccggcgtgcatagccgccgattgaggcaaaaaaaaaacacaaaacacactgtagctcatcacagccaaacgcggcgtcaacgatgacgagcttctgaaattccaacttcgcccttcttctctgtgtnnnnnnnnnnnnnnnnnnnnnnnnnnnnnnnnnnnnnnnnntcggtgaggttagctccatgcctagtcccaagagcagccgcagcggccagatcg

SEQ ID NO: 3660 - DNA, 270 bp, Glycine max
  Clone ID: 700558395H1
gcattgcaagcgctctctttctttgcttttccttccccctttcagtttcttcaacgctgcaactatccatggcaaaccgctggctcagacccgaggtgtatccactgttcgctgcggttggtgccgctgttgggatctgtggattccaattggttcgtaatatctgcatcaaccctgaagtcagggtgaacaaggagggaagaaaggcaggagtgttggagaactttgctgagggagagaagtatgctgagcattcctgaggaagtatgt

SEQ ID NO: 3661 - DNA, 307 bp, Glycine max
  unsure (1)..(307): unsure at all n locations; Clone ID: 700558401H1
cactgtgaatggaacaattcatgtggttgttggtggagggggaagtcacctgtcagacttcacaccatcaccccctatttggagtctttatagggacgttgactatgggtttggcaaattgactgctttcaatcattcatatctcttgtttgagtacaagaaaagtagtgatggagaggtctacgactccttnacccatntcaagagactaacagagatgttttggcctgtgtgcacatggttgtggagaaaactactctagccaacatgagtnatgttgtggtctatgtgtacncccgaatatgga

SEQ ID NO: 3662 - DNA, 301 bp, Glycine max
  unsure (1)..(301): unsure at all n locations; Clone ID: 700558402H1
aacccatggccacnanctccgcattcctcctccttcncctcctcctgctgctccacctcgccatcgccgctcacggcatcggcatcaactacggcacgctcggcgacaaccttcnaccgtncgngnggtgggcgaacttcctgaagacgaagacgacntcgaccgcgtgaagatcnacgacgtgaacccggacatcctgcgggccttcgccggcagcggnatctccgtnacggtgaccgcccncaacggcgacatcggcgccttaancaaaatcgactcgcgagcantgggtggcgagcac

SEQ ID NO: 3663 - DNA, 302 bp, Glycine max
  unsure (1)..(302): unsure at all n locations; Clone ID: 700558403H1
caactaactcactcgcgccatggctgctaccatcatcaccacatgcaagctctcactgcttttgagtcttctctcagtttcacttttgctgggtgtgaggtctgatacccttcagaatgtaggcgcaattccccccacatgcaagcgcatagagtgtcccagctatgatgtcattcacgtaggcaacggctacgaaatccgtcgctatatncacccgttnggatttnaaacagnccnattnaggactttctcncgttgaagccacagcaaccggcttcagggaggttatttgnatataagca

SEQ ID NO: 3664 - DNA, 295 bp, Glycine max
  unsure (1)..(295): unsure at all n locations; Clone ID: 700558405H1
tggagaccctctgctctgcattggtgttcccatctttcagaatcagaacttcagctttctccaaatgtggcatcagggcttccattgccgttgagcaacaaacttcccagactaaggttgctctcctcagaattggtaccagaggaagtccactagctctggctcaggcatatgagaccagagacaagctcatggcatcacatgcagagctagcagaagaaggggctattcagattgtataataanaacaactggtgacaaaatatatcacagccattgcagacattggtgggag

SEQ ID NO: 3665 - DNA, 292 bp, Glycine max
  unsure (1)..(292): unsure at all n locations; Clone ID: 700558406H1
cggggagatgcagaagggcaactatcaaaccgatgcgttcattggtgccgaagggaagcagcagaagcatgacatgtctatgcnttacccattcactcactcaaacccatagccataacctactggctactacnttctcttcttctctctataatagtaacaaccgtaaccccctctttcaattattctccggtattctccggcctcgaattcgagcattttccacngacttcagnatncannnacaccaatgttcttcttctgcctttncccaaagcaggcgaatttcgag

SEQ ID NO: 3666 - DNA, 296 bp, Glycine max
  unsure (1)..(296): unsure at all n locations; Clone ID: 700558407H1
cttgcattaagcatgctgtggagttgtgaacaatcttttanggaaggggcttacaatcgtgtcttgagtgcacgacagacagtgccacatgatacatacgtttattttatggatcttttggcaaagactgtcagagatgaaatagctggttgcagtgagaaggcctatgactatctttcaattaaggatgctaagcaaatgttgctgttctcctctgaccaggaactccttgaatatattaaagaggagcatcctgagtgggagattaagaatggtagtgtcttttccaaaaggcc

SEQ ID NO: 3667 - DNA, 296 bp, Glycine max
  Clone ID: 700558408H1
cagaaaacagcatcgaacccgtcgtagcagaaaaacttgtcaccatggtttcttccgacaaggatccacgagaggatgtccttcaagcctggtacatggatgatagtgatgaagatcaaagactcccccaccacaaagaacccaaggagtttgtctcgttggaccaacttgctgaacttggagtccttagctggaaactagatgctgataaccatgaaaatgatccagagctgaagaagattcgtgaagagcgtggttacacctacatggatgtttgtgaggtctgcccagaaaag

SEQ ID NO: 3668 - DNA, 296 bp, Glycine max
  unsure (1)..(296): unsure at all n locations; Clone ID: 700558409H1
ggaaggactgctggcactatacctaggtttcgagtggatccaaaatggttacgtgacagactgataatattcttgctcccattatcacacatggcatatattccactgtgatattgggacatggcctttggaagataaatgaccaccggcgtagactacgtcaaagaatccaacagctcaagtcagaagaaaaaaactccaactagatttngaaatatcctccangtcccangactgatttnggttttnaaaaaagtgtatattagagttgttgtataaaaaaaaganatgtatcc

SEQ ID NO: 3669 - DNA, 292 bp, Glycine max
  unsure (1)..(292): unsure at all n locations; Clone ID: 700558410H1
ggcagactttcttaaatactgctaagtggattgaagaggtgcgaacagaaagaggcagtgatgtcntattgttcttgttgggaacaaaactgatcttgttgagaaaagacaagtctctatagaggaaggagaagcaaaagcacgtgagctcaatgtcatgtttattgaaactagtgctaaggctgggtttaatataaaggccctatttcgaaaaattgctgcagcattacctggaatggaaacactatcttctgcaaaacaagaagactggttgatgtaaacttaaagtcta

SEQ ID NO: 3670 - DNA, 294 bp, Glycine max
  unsure (1)..(294): unsure at all n locations; Clone ID: 700558411H1
tttcattgatgtattgaaggatgatatttctatagttaaagagctgcctaaagagttcagctggagcacaagagagtactatggcttggctattcgagaaacccgaatcaaggctgcgcctgtgcatgcatcagcccattggtatctggagaatgttttgcctgttctacagagttatggtattgctgcaatctctccattttcnccacagactgagttttgacaacttgcctatggatattcaacacctacgctgtaangtcaacttccaagctttaacctttgttcctcata

SEQ ID NO: 3671 - DNA, 292 bp, Glycine max
  Clone ID: 700558412H1
attttctacttccgtcaaattctccttaaacccgaataaaatttctcttccgttcgccggaaacaaaaaacctctttcggctccaattcgaaggcggttcaatgtcattgctatggctccccctaaacccggtgggaaggccaagaaagtggttggaattataaagctggctcttgaagctgggaaggctacacctgctcctcccgttggccctgctcttggttccaagggtgtcaatattatggctttctgtaaggattacaacgctagaaccgccgacaagcccggttat

SEQ ID NO: 3672 - DNA, 291 bp, Glycine max
  unsure (1)..(291): unsure at all n locations; Clone ID: 700558413H1
gtagagncctcatcgattctcttctttgccttttactacacagactatttattgttggtgtaatttcaccaaattatttataaaagatttttgtgtttgattgatgattttgtttttcaacaaatcgatgatctgtcgtgtccaaacttgtcttttatgcaggatcaagtgaaaactgattattttccattgagtttgatttagttcttagcttctgcttcgatgccttcaatcatgtcacctcagtggcaagacaaggctgctggtttcttttcttcctctggggtcaag

SEQ ID NO: 3673 - DNA, 292 bp, Glycine max
  Clone ID: 700558414H1
gtcctgctgaattgttggaacaggtcagaggtctcactaagtgggttcctccgccagttaagatgactagtagctatgtaagagacagcatcaatgtttcaaggaagagaatggatgtggaatccttggacatgcttcagtttcattggtgggattactcgaatccaggctacctggatgcactaaaacacctaacagatttgaaagaagaaggtaaaatcaagactgtggctctgacaaattttgatacggagagattacaaattattctgaaaatgaggttcctgttgta

SEQ ID NO: 3674 - DNA, 290 bp, Glycine max
  unsure (1)..(290): unsure at all n locations; Clone ID: 700558415H1
gtcgcgggtttgggtttttgacgatgagtactgttgaagaagctgaaagcgctgtggagaaattcaaccgctatgatatcgatggaagactgctgactgttaataaggcttctccaagaggaactcggcccgaacgcccaccacctcgtcgttccttgagtcttcctatcaatctatgttggtatttgccatgggatgttgacaatacccggctnaagcaattttcataaancacggtaatgttgtnaatgctcgggtagtctatgacagggagtcaggtcgatcacgtg

SEQ ID NO: 3675 - DNA, 296 bp, Glycine max
  unsure (1)..(296): unsure at all n locations; Clone ID: 700558416H1
tgaagtngaagtcttgcccttctctcttcaactccaaacacaagacatcatcatccatggctgcctccgtctccactgtncggagctgtacaacagagctcttttgaacctgaatgggtctggacctggggtttcagctcccagttcatccttctttgggagcagcttgaagaaggttattggctcaagggtccccaacacaaagatttcctctggaagcttcaagattgttgctgtagaagagaagaangagattgaagagacccagcagaccgacaaggacagatggaagggtc

SEQ ID NO: 3676 - DNA, 284 bp, Glycine max
  unsure (1)..(284): unsure at all n locations; Clone ID: 700558417H1
tgncaactttattnttnttgcttaataatttttccanntgtgcagatgaacatntacctgagttagtgaattctgatcctagtcaatctnacataatctaaatttggttagggtttatcatcgttaattcgattgntaattnggtctttgtcattgagggtttctgggtcacagtgagtggatgtgaaggtttagatttcaaccnggcgggtcngtntngntttctaaaaggtttaaggttnaagcttttcgagctgctngangcaataatngcgaagnggatc

SEQ ID NO: 3677 - DNA, 301 bp, Glycine max
  unsure (1)..(301): unsure at all n locations; Clone ID: 700558418H1
ctgagacatctgantttgctaggagatgggttccattttgtaaganatacaanattgagccccgggcaccagaatggtactttggtcagaagatggactatctganngcntaaagtacacccagcanttgtcagggaaaggagagcnatgaagagggattatgaagaatttaaggtgaggattaacagnttaatggccaacagcacaaaaggttcccngaggatgganggccatgcaanangggacncctnggccnggaaataatgggaggnntcancctggcatgatncaggncttcctg

SEQ ID NO: 3678 - DNA, 202 bp, Glycine max
  unsure (1)..(202): unsure at all n locations; Clone ID: 700558419H1
cgcagttcagttctctaatnatntatgccgaaganaagttggggtcaatctgcgatctcgtaattntntcatcatntnacagtaacggatgaagctaagcancgaggtagaagctgagagnnaagttggatggctatngaagacgatatntnntgtcactgnaggggtagcaggataccatnnccgtnctnatatggggaga

SEQ ID NO: 3679 - DNA, 113 bp, Glycine max
  unsure (1)..(113): unsure at all n locations; Clone ID: 700558422H1
gaattgtaaaaaggaaaggggaaggnagcaaggcaaggnaggagagtggatcgattcctcagcagcaccagacatttataaaagcnctttcccttccctcanatcgcncatac

SEQ ID NO: 3680 - DNA, 291 bp, Glycine max
  unsure (1)..(291): unsure at all n locations; Clone ID: 700558423H1
gcgtgtactttcttgcgaaacagaagggcgaaggggcaaacacaacttttttgtttttttgtagagcgagagagaaaaaaaatgttggggatcttcagcagttccgtggtgtcgccgccggaggagctggtggctgccggcagcagaacgccgtcgccgaagacgacggcggggaagctgctgaaccggttcgtggagaacaaggcgtcggcggtgtcgctncaggtggnagaacacgtgcattggcttacacgcaccacaacgagtnaccgtggcatcccagatctttgc

SEQ ID NO: 3681 - DNA, 292 bp, Glycine max
  unsure (1)..(292): unsure at all n locations; Clone ID: 700558424H1
gcagctactatggtgggtcaaaccgcaggagataagattaaggagtatataaagctgagtacagtacccaacagcaacgattgagtttagnggaactgtgattggnggttcncctncngctcctcaaantgnttncttntctagccgtggaccgaaccancttacancgcagattctgaaacctgatgttantgctcctngtgttaacatttgancagggtgnactggnncgtgngggtnccacggattttgacatnatcctanaagggtcnanttnaacataatatcgggg

SEQ ID NO: 3682 - DNA, 289 bp, Glycine max
  unsure (1)..(289): unsure at all n locations; Clone ID: 700558425H1
acttgaagcttcgattctgtgttgttgcttttacttcccatcagaatcagaatggatggtgcaaagacacatggtgctgtgttggcatgtacagatggagcagttcttcccgtcagtcaagtgtttgatgcaattagagagcttgggaatgaaggagttgagcaatgggatcctctagttcttacttctgcctcactcttgagcaagttgccagtggattcttcctctgtngattttctgattttaatttggctgtcaattgattgtcctgtggaccaactgattcacg

SEQ ID NO: 3683 - DNA, 288 bp, Glycine max
  Clone ID: 700558427H1
cacttcttctttcatcattcatcgcctttcaccacgcacgcagatcctttattcctataatccttccttcgctactctccaaatttcgactctttcgatcagatccgcgacacccaccccaccaaaaccttgcgcaacccatccatgacgcttggctcaggaggatccagtgtcgttgttcctaggaacttcagattgctggaggagcttgaacgtggtgaaaaaggaattggagatggcacagttagctatggatggatgatggtgatgactttacatgcgctcttg

SEQ ID NO: 3684 - DNA, 287 bp, Glycine max
  Clone ID: 700558428H1
cacaaacacatacattgtagtatcacttttgtctcggaatttgttcttttgagttatggcaagcttaaaggttgcatgtgtggttttgatgtgcatggctgtgatgagtgcaccaatgatggtgcaagccgtgtcatgcaatgatgtttctgtgaacctagcaccgtgcctatcttacctgatgcagggtggagatgttccagaatcgtgctgtagcggagtgaggaacattctgggttctgccagcaccacctttgacaaacaaaccgtgtgcaaatgtcttcagc

SEQ ID NO: 3685 - DNA, 284 bp, Glycine max
  Clone ID: 700558429H1
cccaaactggtattggaacagccattgcaattgctggtgtggcactctactcgttcatcaaagccagaatggaggaagaaaagcgacaagcaaaagcagcataagaggaaagtcgtcaacctggaggatgtcttgcactgtaaatcaccacaaatttccttcaaaataattgagtgactggttcagtgttgtactatcctgtgatagcgcccttttatttttcctctatttttgtcaaatattttcttttccttttttccttttctctcttcatcagaaaacaa

SEQ ID NO: 3686 - DNA, 290 bp, Glycine max
  unsure (1)..(290): unsure at all n locations; Clone ID: 700558430H1
ctctcttcgacctcgcatcgcaccttcaacttaacctattccacttgtaatcgtaaatcnctttgctagaagaagagacaaagtgtgtctgtgtgtgtgagagagagagcaatggctggctcgtgggcacgccgttctctgattgttctagccatcatttccttcggatgtactatttgcgatttccattgctaaggaggaagccaccaagttagggacggtcatcggcatgatcttggaacaacctattcatgtgtcggtgtttacaagaatggccatgttgaatcata

SEQ ID NO: 3687 - DNA, 194 bp, Glycine max
  unsure (1)..(194): unsure at all n locations; Clone ID: 700558431H1
agaaacgcatacgcgcaatttctgttgttcagagctcttcaggaaganaaganaaacagagaaaaccaaaccctaattagaaacgatttcggaatccctaattcgcaaatcgcaaccctagttgtgctgtgcgttgttgtagtggtttttggaagaggaggcttgagctaaacgctgcgtttcgacgacgatga

SEQ ID NO: 3688 - DNA, 290 bp, Glycine max
  unsure (1)..(290): unsure at all n locations; Clone ID: 700558432H1
gctttgattagtgtggcctagttgttgtnttctcgatgagaaaggcttcttccactatgcattgcgcacttctgcgcttttgggttcccttgttgctgcttgctagcttcagctatgctccttctgtttcggccacaactgaaatttcagggaatgaagtgaacacagatgggaaggtgataaatgaagagttagcaaaaccaagtctaaaaggacatgatgaagaagcaaagttcaaaggattttttccaaaaccattccctatagtnaaaccattccaagcccatncc

SEQ ID NO: 3689 - DNA, 152 bp, Glycine max
  unsure (1)..(152): unsure at all n locations; Clone ID: 700558433H1
atggcagctgcttctcctatggcaagccaactcaagtccaccttcactaaaactcttgtagctcccaagggcctctctgcctcttcaccacnccacctcctgccttcnaagaggcaatttagcttcactgttagggccanccaatcagaaaa

SEQ ID NO: 3690 - DNA, 113 bp, Glycine max
  unsure (1)..(113): unsure at all n locations; Clone ID: 700558434H1
ganagtnttcaaagccaagcaaatacgagctntacccaattttcttgctgttgaattttccactgttcaatcttcaaaatcacatttttctcgatcttcacctnctcnggttg

SEQ ID NO: 3691 - DNA, 117 bp, Glycine max
  unsure (1)..(117): unsure at all n locations; Clone ID: 700558435H1
ttccanagcactttttattttcttctctctgcgatngcngtggatttctcnaaagcngtcgncgacgggctgaanctctgccaagngnatananntcgtnaaggccagggcgntgtc

SEQ ID NO: 3692 - DNA, 292 bp, Glycine max
  Clone ID: 700558436H1
gcgtgtactttcttgcgaaacagaagggcgaaggggcaaacacaacttttttgtttttttgtagagcgagagagaaaaaaaatgttggggatcttcagcagttccgtggtgtcgccgccggaggagctggtggctgccggcagcagaacgccgtcgccgaagacgacggcggggaagctgctgaaccggttcgtggagaacaaggcgtcggcggtgtcgctgcaggtgggagaacacgtgcagttggcttacacgcaccacaacgagtcaccgtggcatcccagatctttgc

SEQ ID NO: 3693 - DNA, 291 bp, Glycine max
  unsure (1)..(291): unsure at all n locations; Clone ID: 700558437H1
ttctctctgcagaatttcccaaatttctccactaccctatctcctttgctcctgaaactcccacattactncaccagcaatgcacgatcttcaatacgaatgcngtttcgatatttgatatcggagtatcggtgtntgancggctnaattggnantggnaaatgcttgaggcaanggacagtncggtcaatggtgggttcacccatttgcagagctgtggagatagcagcgaagaagagttatcggtgcttcctcgtnacacnaaagtggtcgtaacaggaaataaccgca

SEQ ID NO: 3694 - DNA, 144 bp, Glycine max
  unsure (1)..(144): unsure at all n locations; Clone ID: 700558438H1
ttgacttccantatagtntgtnancatccttgtcttcagtttcntcaattggtgaacctttacaacctaattatatagcaagacattagttatanaactcaatngcnaaccttgtgagtcttgagcaattgtnacaattagaaa

SEQ ID NO: 3695 - DNA, 280 bp, Glycine max
  unsure (1)..(280): unsure at all n locations; Clone ID: 700558441H1
atcacaactcttttgtntctctggcatgcaactaaaaaactctgctgctgtagcnctggcttgcaactaaaaaactactgctgctgtagcaaagcctcagttctatggcttcctagttgcccatttgagaaaaaaaaaaccacaaagatcttgaatttggcngattctggaaatgggttctcagataaggcttcngggcctgtgtctttggatgnacttggcatgcttaagcttcatnggtgtgggtgctgtgtatggaagagaaggtgaagttttggac

SEQ ID NO: 3696 - DNA, 288 bp, Glycine max
  unsure (1)..(288): unsure at all n locations; Clone ID: 700558442H1
gaagttaaaagccttagccttccctacaactccaaacancaagacatcatcatccatggctgcctccgtctccactgtncggagctgtcaacagagctcttttgaacctgaatggttctggagctggagcttcagctcccagttcagccttctttgggaccagcttgaagaaggttattgcctcaagggtcccccacagcaaggtttccggtggaagcttcaagattgttgctgtagaagagaagaaagagattgaagagacccagcagaccgacaaggacagatgga

SEQ ID NO: 3697 - DNA, 288 bp, Glycine max
  unsure (1)..(288): unsure at all n locations; Clone ID: 700558443H1
ctgaaaaccaaaacaagaggaattaaagttcattcatttaaaaaagaaagtaaagataaaaataacatgcacaacaacatgagcactctctctttcttcatccttctttcaacactactaactgtgccgttacggtggtcgcgacttaggagataaaaacccgttcaccccgaaggcttacgtggcacgttactgggtnnaacacgtccgcaacaacttgccaaagccatcgtttctctctcaaaagcatccccaatgagcgcttccgacacggcgtcgttcgccaag

SEQ ID NO: 3698 - DNA, 284 bp, Glycine max
  unsure (1)..(284): unsure at all n locations; Clone ID: 700558444H1
gctggacctactggcggcaggcattttgcaaatcgcagttctagtgctcttgcgtctaatgtgcctgctgaagcagctgcctttgatccattgattgggaagaaagtttggactaggtggcctgaagataaccacttctatgaggctgttgtaactgattacaaccctgctgatggccggcatgctttggtttatgatattaataaagtaaatgagacttgggaatgggttgatctcaaagaggtatatgntttcctatgctgtgctgcntatatcagagcagt

SEQ ID NO: 3699 - DNA, 285 bp, Glycine max
  Clone ID: 700558445H1
gcagaaagcaagctcatcctagagttttaaaaatggcagcagcctcctccatggctctctcttccccatccttggctggcaaggccgtgaagctgggcccatcagcccccgaagtcgggagggtcagcatgaggaagaccgtcaccaagcaggcctcctccggaagcccatggtacggcccagaccgcgtcaagtacttgggcccattctctggcgagcccccgtcctacctcactggcgagttcccaggtgactacggctgggacatgctgggctttcggccga

SEQ ID NO: 3700 - DNA, 285 bp, Glycine max
  Clone ID: 700558446H1
gttgcatcaccgcaagtccacaacatggctgccactgccgctgcaggcatagcttccttgttttcttcttctattaacagtgtcaaatgtcttcgttcctccaagaactgctccattatagacccccttataaccacagtgccctcaaaccgtggcatgtttgtgtcacacttggtggaacctttgtccattgggggtgccattaattcgcacaagttgtgggggcctagaatttctgctgctgttgcacaagaagaggctgttgttgtggctgatgatgaggta

SEQ ID NO: 3701 - DNA, 275 bp, Glycine max
  unsure (1)..(275): unsure at all n locations; Clone ID: 700558447H1
ctgcatcactgcaaagttcacaggtggttttgcttttaagagaaaagagcgtggangctgcatctggagggcgagtttgttgctcagtgctggcaccaccaccaccggcctggccgggacgagcggttccagagcaaggcagcaagacttgggatggaccaaaacccatttcattgtngggtgtactngttcaattggaactcagacactagatttgtggcagngatccagataagtttaaagttgtggcattgcagctggttcaaatgttactc

SEQ ID NO: 3702 - DNA, 285 bp, Glycine max
  unsure (1)..(285): unsure at all n locations; Clone ID: 700558448H1
gnanngtncccttagaagaatanngtaanatggcatcactcaaagctgagnaacctgttgaaaaatcnngttagcttcncaaccatctgcaggacaggtgaagnaagantctnctgccaaacctagttcaggcacntccaaagcnccggtctcgaaaccnaccccataganaattcnangccagactaggnngacngcaagcagcannaatangcngaagatgcagagtaaaaagtacgaggattaaanaatactngttgttgcattggnattatgggagagtct

SEQ ID NO: 3703 - DNA, 284 bp, Glycine max
  Clone ID: 700558449H1
gtaagtttattcttctctcggcgtcgccatggacgaagaagaggtgcgcaagatcttcagcaagttcgacaagaacggcgacggcaagatctcgtgcgcggactgaaggagatgatggcggcgctgggatccaaaacgacgtcggacgaggtgaagcgcatgatggcggagctggaccggaacggcgacggctacattgatttgaaggagttcggcgattccactgcggcggcggtggcgacgggagggagctccgggaggcgttcgagctgtacgatctggac

SEQ ID NO: 3704 - DNA, 288 bp, Glycine max
  unsure (1)..(288): unsure at all n locations; Clone ID: 700558450H1
gtaagtttattcttctctcggcgtcgccatggacgaagaagtggtgcgcaagatcttcagcaagttcgacaagaacggcgacggcaagatctcgtgcgcggagtgaaggagatgatggcggcgctgggatccaaaacgacgtcagacgaggtgaagcgcatgatgancggagcttgaccggaacggcgnacggctacattgatttgaagnagtncggcganttccactgcggcggcggtggcgacgagagananctccnggaggcgttcgagctgtnacgatctggna

SEQ ID NO: 3705 - DNA, 287 bp, Glycine max
  unsure (1)..(287): unsure at all n locations; Clone ID: 700558451H1
attgaactccgaatccattaagcaattcagtgaagctgaaggtatatgcggaccgcatgtcccaaccatcccgtgcgattctcatattttacaagtattttctctnattatctttgcttttccttcttattttatttttggaatttgaatttggtctctgccgcatgttagagtgaatggaatagatttgaggatgtcnaagtcgattatcccaacatcacnagcnatctcccnatttccgagtgatnaaccctttaaagaaagtccctgnngttgttnatggaggg

SEQ ID NO: 3706 - DNA, 293 bp, Glycine max
  unsure (1)..(293): unsure at all n locations; Clone ID: 700558452H1
gggatggtggaaatggaatcggcagctgaaaaccctaattacccggcggtggactacaagcgaccttccatcttgtacatttcctacggaggcccgccctcagagttacatccgagttcgatagtgaaagcgcagtcttcttccataagatttcctgcaagttgttggacagccttgccaagttcaagttttcgttcaaccacagcggtaagggcggcgacatctccgaacctcaatncagctttgtctccaagcaccttagcctccattacgacctcgaagaccataatgct

SEQ ID NO: 3707 - DNA, 278 bp, Glycine max
  unsure (1)..(278): unsure at all n locations; Clone ID: 700558453H1
aatttgttgactggtgccccactggtttcaagtgtggaatcaattaccagcctcnaactgttgttcctggcggtgatcttgccaaggttcagagggctgtgtgcatgatctccaattccaccagtgttgttgaggtcttctctcgcatcgaccacaaatttgacctcatgtatgccaagagggcttttgttcattggtatgttggtgagggtatggaagagggagagttctctgaggctcgtgaagatcttgctgccctggagaaagattatgaggaa

SEQ ID NO: 3708 - DNA, 169 bp, Glycine max
  unsure (1)..(169): unsure at all n locations; Clone ID: 700558454H1
gggctatatagcataaacatttgagtcttcnttgcacaatgtcaacctcttccataaacgggtggtgcctctccttccatactccccagccaaaacctctctcaggaaggccacattacgcccttccgtcttcgcaacccttaacactcctncttctccttcctcttca

SEQ ID NO: 3709 - DNA, 284 bp, Glycine max
  unsure (1)..(284): unsure at all n locations; Clone ID: 700558455H1
acaaaaccctgaagaaagacacagccattgtttgtttactttccattgattgagcganagtttgtnttttctgcgatcattttccattgggtggaaganagtctcaacctttagtcgaaagagcaaggatctgagtgagtgagcgatcatgtntggtggtgcgattatctccgacttcattccagcgggtcccgccggcggggcgcacgcgtgnaccgccgacatcctntggccgaatttnaggaagcggttctcgaagtcgctgctggacgatgattcgaggc

SEQ ID NO: 3710 - DNA, 287 bp, Glycine max
  unsure (1)..(287): unsure at all n locations; Clone ID: 700558456H1
gtccaagcagcctccaattcgtgccactctcttcaaaatggccgttaccttctcaaatctccacacagaatcaggtctcaagtccctcgacgacttcctctctgggaaggtctacgtttctggggatcagttcacaaaggacgacatcaaagtgtatggtgctgttttggagaagccaggtgactctttncccaatgctgccaagtggtacgaggttgtctcatctcagcttgctgcaagcttccccggcaatgctcaaggggtgagattcagtggcaaagcttctg

SEQ ID NO: 3711 - DNA, 282 bp, Glycine max
  Clone ID: 700558457H1
agggtaccagattttattaaggcaggagctgatatagtcagtgttcattgtgaacaatcttccaccatccatttgcatcgtactgttaatcaagtgaaaagtctgggagctaaagctggagttgtcttaaaccctgctacccccttaagtgcaatagaatatgtcctgatgtggtggatttggtcttaattatgtccgtaaaccctggctttggtggccagagttttattgagagtcaagtaaagaaaatttctgacttgagaagagtgtgcgcggaaaagg

SEQ ID NO: 3712 - DNA, 285 bp, Glycine max
  unsure (1)..(285): unsure at all n locations; Clone ID: 700558458H1
gcacttactagtccaacagcgacggctgaacctctttgttctctctgtctnnnnnnnnnnnnnnnnnnnnnnnnnnnnnnnnnnntcaaatatccttgagccagacatgtacaggaacgctgcttcacgtcttagggtcatcagtgcccgttcgtgcagcagcagcaggatacctgccagtgccagatttgcaagttccgttgccacacaacaatcctctnctggtttgggtggtttatttggatggctcactggagaccgatccagttctttaccatctctgga

SEQ ID NO: 3713 - DNA, 282 bp, Glycine max
  unsure (1)..(282): unsure at all n locations; Clone ID: 700558459H1
ctcactcactgcagatctcaattgcatcgctgtccatggctaccatcgttagcatcaaggcccgccagatcttcgacagtcgtggcaatccaactgtcgaggtggatttgacttgctccgatggtacttttgccagagctgctgttccaagtggtgcatccactgggatttatgaggcccttgaattgagagatggaggatctgactaccttggaaagggtgtatcaaaggctgttgncaatgtgaacaccgtcattggccctgctttgattggcaaggacc

SEQ ID NO: 3714 - DNA, 281 bp, Glycine max
  unsure (1)..(281): unsure at all n locations; Clone ID: 700558460H1
aaagaagatggcctcacaggtttgcaaagctgcttccagagccgcgaggtcccttctactccgcttccagagcctcccatggacgtgcggttggggctgctacggctgtttcattgagctgcaaagtgcctcttttctacggaaagaacggttctggaagtggtnnnnnnnnnnnnnnnnnnnnnnnnnggatttcaggagcacttgctcttcctgccgcagcttacatgttccaagatcaggaggtgcgcgcantgagctggagcgcactttcattgcca

SEQ ID NO: 3715 - DNA, 285 bp, Glycine max
  unsure (1)..(285): unsure at all n locations; Clone ID: 700558461H1
aaaacatctcaatgggttcttcttctattacaacatcnctnccaaaccatgaccatggctgcgatcgtgctcctgttcacggtctttgccgtttcctccgccctagacatgtcgataatctcgtacgacagcgcccacgcggacaaggccgccacgttgcnnaccgaggaggagctgatgtccatgtacgagcagtggctcgtgaagcacgggaaggtgtacaacgcgctcggcgagaaggagaagcgcttccagatcttcaaggacaacctgcgattcatcgac

SEQ ID NO: 3716 - DNA, 279 bp, Glycine max
  unsure (1)..(279): unsure at all n locations; Clone ID: 700558462H1
tttgctctggcctccattcaggagccaacctttctgccagatcctgcaggatttagcagtttcatatattatatacgttctgcttagacatgttgagtggttatttggtgatatcattgccctatattttagatagtcttttttatnatncatcaggattgttatttcataattcagcngaaagttaccttaatagaatagatccattcttccatagctatcngcaaatntcattagtttcatagaanggtatccaactcctaagaattattttcactg

SEQ ID NO: 3717 - DNA, 277 bp, Glycine max
  unsure (1)..(277): unsure at all n locations; Clone ID: 700558463H1
atcacacctccagatacaccaaccatcatcacagttccttccaccaatcctgtcacgtcnttcccccaccaatccagcttcaacacctgtacacagttccttctaccacaccagtngttcccttaccccctacaaatccagccaatccagttaccaatcctgtggctcttatccaccaccatcatcaggaagtgttcctgtcanngtgcatgctctctcnaagcacaatgctcaagctatgcnagnggggcagagttggtgtgtggcaaagatggnt

SEQ ID NO: 3718 - DNA, 284 bp, Glycine max
  unsure (1)..(284): unsure at all n locations; Clone ID: 700558464H1
gaacacaataaactccttcctcatttctcatttctcattcaacaccatggcaagaanaaccaagtccattttcttggccttcttactactatgctctttctcactgggggtagtggtagtagcccaagaggaggcaatagcaaaatccgaaagtgaagcattaggggacccagagaaaagagaaacattgaaatcatcattggtggaggtggttcacctgctcttctccctctccccctacatattgcccacctcctccaccaaaaccatgagccggttggaga

SEQ ID NO: 3719 - DNA, 291 bp, Glycine max
  unsure (1)..(291): unsure at all n locations; Clone ID: 700558465H1
gcaagccaagtgcacccgaagaattggtatccaattccactggtattttgncgaccctggggcaaactgccagaaaatgttccctgtcatcccaaacttgcagattttgctaactgtatgaagaagaaaggtcggggaatgtccatatttgtctctatactagatggggattaccatgaatgtgctgaagatgccaagactgcttgcaaacaacttagnacctacatcgattacaaaatngtgaaggtgtggctganattgttgttgcccctaacatgtctnaaggcttcc

SEQ ID NO: 3720 - DNA, 102 bp, Glycine max
  unsure (1)..(102): unsure at all n locations; Clone ID: 700558466H1
atcacagaaaaacaaaaaaagctactcaaaacttggctccaattagcctttctttttttgtnttgaggaaaaacagaaaagttccacacaacatacgnnatc

SEQ ID NO: 3721 - DNA, 215 bp, Glycine max
  unsure (1)..(215): unsure at all n locations; Clone ID: 700558467H1
cgctcgtgggtcccaccctcaaggacgaggtgatgaagatcacgccggtccagaagcagacccgggccgggcagaggacccggttcaaggccttcgtcgtcgtcggagacaacaacggccacgtcgggctgggcgtgaagtgcagcaaggaagtggcgacagctattcgtggcgcgattattctggcgaantgtctnttatccccgtgaggaggg

SEQ ID NO: 3722 - DNA, 285 bp, Glycine max
  Clone ID: 700558468H1
ggcaagagtggtggcactccaacagaaccaactatctttctctaccttagcttcctctctttctgacttcagtggaaccagacttcaaactcaacttcagttcaagagaaagcaatgccatccaaaagggtctttctacgtctccgcatcgagcaccaagaaaatcctaataatgggaggcaccaggtttattggtgtgtttttgtctaggctcctgtcaaagagggtcaccaggtgactttattcacaagaggtaaagcgcctgtcatcaacagttgccaggtg

SEQ ID NO: 3723 - DNA, 282 bp, Glycine max
  unsure (1)..(282): unsure at all n locations; Clone ID: 700558469H1
ccgctattctactcgcaagcaaatcagaacaagagaagagaatggcaggagcagaggggctaaacagagaacagtacgtgtaccttgcganntgtcggagcaggcggagggtacgaagagatggtggngttcatgcagaaggtggtggtggggtggacgccggcgtcggagctcacggtggaggagcgcnacctcctcttcggtggcctacaagaacgtgatcgggnctctgcgtnccnctggcgcatcgtgtcctccatcgaacagaaggaggaanggcgc

SEQ ID NO: 3724 - DNA, 283 bp, Glycine max
  unsure (1)..(283): unsure at all n locations; Clone ID: 700558471H1
aganaacgaacgagtttaagcaaatatcacttgcagtactaatggcttcaatgaataaccaaaaagaaattgagctctttgagggccaatctcttttgtacatgcagttatatggcaacctaagaactatgtgtcttgagtgggttgttcaacttggtattccagacataatacacacncatggaaaacccattactctttctgagttggtctcaactctccaaattccaccacctaaggctggnnttgtgcagcggttcatgcgttttttggtatcaatgga

SEQ ID NO: 3725 - DNA, 284 bp, Glycine max
  unsure (1)..(284): unsure at all n locations; Clone ID: 700558472H1
ganaagcataacaagcagagcacattgtttagtgctagcatttccaggtcaaggccatattcaatcccatgcttcaattactccaagctattggagcgtcaaggggtgagaataacacttgttactactcgtttctattccaagaatttgcaaaacgtgcctccttccattgctcttgaaaccatttctgatgggtttgatgaagttgggccccaagaggctgggagccccaaggcctatatagatcgcttgtgccagttggatcagaaacctttcatgagctt

SEQ ID NO: 3726 - DNA, 250 bp, Glycine max
  unsure (1)..(250): unsure at all n locations; Clone ID: 700558473H1
tggncttcatnggcatncgccttgnacancaattcggatttncnaagattggcatcanatactnngtgtccgggnntggtggnagtgnacngtcgtcncnatttatcagagaccacatctctgttngngcttctggtgcccttnttggacttcttggcgcaatgctgtctgaacttatcacaaactggactatatattccaanaaagcnatggctttaatancccttctagngatcatngngatcancct

SEQ ID NO: 3727 - DNA, 280 bp, Glycine max
  Clone ID: 700558475H1
gtcatgtcttgctagtagaaatggaggtgtgaaggactcttggaagatagattatgaggcaacaaggaatagccttgttgctggaagaaaacgtggggcttcacattttgtgttgctttcagcaatatgtgtgcagaagccgctcctcgagtttcagcgtgccaagttgaagtttgaggatgagttggtgaagttagctgaggaggatggtggattcacttatagcatagtgaggccaactgcatttttcaagagtttggggggtcaggttgagttagtg

SEQ ID NO: 3728 - DNA, 278 bp, Glycine max
  Clone ID: 700558476H1
gcagagcattggagccattaatcctaccttcagaaactagccagattgttaaggaacggcttttgaattttgtaagatcattatcaacagtactggcctttgcctattgtttgtcaagtgtaattcaacaagtgcagaaattcttagccgagagtactgatgcaagtgaggcgagaaatatgggattccaatttgctggcaaagctgtttactctgcggtatggatagctgccttttcactgtttatggaatgctgggcttctctacccagaaatggg

SEQ ID NO: 3729 - DNA, 280 bp, Glycine max
  unsure (1)..(280): unsure at all n locations; Clone ID: 700558477H1
ctttaccatcccggattctccctgccactacaaattcccaacttcgcaaaccctagnnnnnnnnnnnnnnnnnnnnnnnnnnnnnnnnnnagaattcgaagagaaatcaaatcgaatctcatttgatctgtgtgtggttgcggcggcggcaatggcggagcacttggcatcgatattcgggacggagaaggacagggtgaatgcccgttctacttcaagatcggcgcgtgcaggcacggcgaccggtgctcgcgtctccacacgaagccgagcataagcc

SEQ ID NO: 3730 - DNA, 281 bp, Glycine max
  unsure (1)..(281): unsure at all n locations; Clone ID: 700558478H1
agaaagcctccaggggatcgggccgagacaccgacagacccctttngtatccgggcgccaaagcgcccgaatacctcgatgggagtcttgtcggagactacgggttcgatccgtttgggctagggaagcccgcggagtacctgcagttcgagctggactcgctggaccagaaccttgcgaagaacgtggctggggacatcattggaaccaggaccgagctcgcggacgtgaagtccacgccgtttcagccctacagcgaggtgtttgggctccagaggttc

SEQ ID NO: 3731 - DNA, 275 bp, Glycine max
  unsure (1)..(275): unsure at all n locations; Clone ID: 700558479H1
caattctccacaagagtggacattcttccacaagaatatgtnnttaanttgtctgaacttcaggatcaagttcctccatttccctcagagnctgctatagctattgtcgaagaagaacttggaagtccttagcaggtgtcttcgatcattttgagtatgaaccaatagctgctgcaagtcttggtcaggttcatcgtgcaagattaaggggacaggagttttttgtnaangtanaanncgggtccaaaanctnnnnaaacannttnaaaaaccgg

SEQ ID NO: 3732 - DNA, 279 bp, Glycine max
  Clone ID: 700558480H1
atcttgactgggttcaagatgcatgctcgtggttggatttccatctattgcatgccacctccgcccagcatttaagggttctgcccctatcaatctttctgatcgtctcaatcaggtgcttcggtgggccttaggttcaattgagatctttcttagcaggcattgtcccttgtggtatggctacaatgggaagttgaagcctctgatgaggctgcttatatcaacaccatgtctacccattacctcaatcccattgattgcttactgtacgcttcctgc

SEQ ID NO: 3733 - DNA, 290 bp, Glycine max
  unsure (1)..(290): unsure at all n locations; Clone ID: 700558481H1
cacagaattagggtcacgagggtttcatcctgcggcatcagacatgggagncggcaatgggcaaaaggcaaagatggctcgcgagaagaacatcgagaagcagaaggccgcctcaaagggaagccagctggattcaaacaagaaagcaatgtcgatccagtgcaaggtgtgcatgcaaacatttatgtgcaccacatcggaagtgaatgtagggagcatgctgaagccaaacaccctaaaatctgatgtttatgcttgttttcctcatctcaaaaagtgaacatattgga

SEQ ID NO: 3734 - DNA, 290 bp, Glycine max
  unsure (1)..(290): unsure at all n locations; Clone ID: 700558483H1
gnaaattnccattcaggtcacaagnaatgggatacagacanannatgtcantatatganttacntcctggtgacnttgtnnancttgaccattggtgncccagtccctgctgatggactanttgtcncaggattttctgtgttgatagatgagtcaagcttaacaggngaacgtgcagccagtgatggtgaattcngaaaanccatttctnctgtctgggaccaaggttccaanncgggttcgtgcaagatgttggttactatgttggcancagncnctcaatggggcca

SEQ ID NO: 3735 - DNA, 277 bp, Glycine max
  unsure (1)..(277): unsure at all n locations; Clone ID: 700558484H1
gtctttgcagaggaccaagttgtttccttttttcattgtccttgtttccttcacatgtagtctctcccttgctatgtccagtaaccagttggagcagtttgcttcggaggaagaagtgtttcaactattccaagcgtggcagaaggagcataagcgtgaatatggcaaccaagaggagaaggcnagaggttccagatattccaaagtattngaggnacagcaangagatgaatgcgagaggagtcactacgacgcaacntcgtntgggtctgaacaa

SEQ ID NO: 3736 - DNA, 279 bp, Glycine max
  Clone ID: 700558487H1
ctcattctgtgactctgtgcttagttaacgttaacagtgacttaagatggcggattctgcagatgtcacccacgatgttgtgtccctcctctcttctcctcaaagggactttcttcttcgaaacaacggcgatcaggttaaaattgacagcttgaagggtaagaaacttggtttgtatttttcggcatcctggtgtggtccatgtcaaacatttacgccaactttggtggatgtgtacaatgaggttgcaaaaaaaggtgacttccagatcgttttcat

SEQ ID NO: 3737 - DNA, 279 bp, Glycine max
  unsure (1)..(279): unsure at all n locations; Clone ID: 700558488H1
gttaaatcattcagtgaagcattggatactacccaaaccatcatatggaatggaccaatgggagtgtttgagtttgacaagtttgctgttggtacagaggctantgcaaagaagctggctgatctcagtggaaagggggtgaccacaattatcggaggaggagattctgttgcagctgtggagaaagtaggagttgctagtgtcatgagccacatatctactggtggtggtgccagtttggagttattggaaggcaaagagctccaggagtcctgctct

SEQ ID NO: 3738 - DNA, 281 bp, Glycine max
  unsure (1)..(281): unsure at all n locations; Clone ID: 700558490H1
ggtcgattgacataacacccgaatccaagtgaaacgnaaaacactcatgcatcatggattcagttgcattaaatgataaaagcaatgataagcctcttcacgttgccatgctcccatggctggccatgggtcacanatacccttacttcgaagtcgccaagattcttgcncaaaagggtcactttgtnaccttcataaacagccccaaaaacattgaccgcatgcccaanaccccganacacttagaaccatncatcaaactcgtgaagctacccttgcna

SEQ ID NO: 3739 - DNA, 275 bp, Glycine max
  unsure (1)..(275): unsure at all n locations; Clone ID: 700558493H1
gcattncaagcgctctctttctttgcttttccttccccctttcantttctnnnaacgctgcaactatccatggcaaaccgctggctcagacccgaggtgtatccactgttcgctgcggttggtgccgctgttnggatctgtggattccaattggttcgtaatatctgcatcaaccctgaagtcagggtgaacaaggagggaagaaaggcaggagtgttggagaatttgctnngggagagaatatgctgagcattcctgaggaagtatgtgcgcca

SEQ ID NO: 3740 - DNA, 277 bp, Glycine max
  unsure (1)..(277): unsure at all n locations; Clone ID: 700558494H1
gcattgcaagcgctctcnttcttngcttttccttccccctttcagtttcttcaacgctgcaactatccatggcaaaccgctggctcagacccgaggtgtatccactgttcgctgcggttngtgccgctgttgggatctgtngatnccaattggttcgtaatatcngcatcaaccctgaagtcagggtgaacaaggagggaagaaaggcagnagtgttngagaacttngctgagggagagaatatgctgagcatttcctgaggnantatgtncgcaac

SEQ ID NO: 3741 - DNA, 296 bp, Glycine max
  unsure (1)..(296): unsure at all n locations; Clone ID: 700558501H1
aaaagtactcataanttccgattttntccctggaaaaatggcagcctctgccggcggccagataactctctcgtcaaccgtgcagttacatggagtggcctgtagtaggaattggaagctagtgaagttctgtaatggggaagtcatgggacgtaagcttgtgttaaaagtgcttatggtggcagcactaaggatgttaggcaccaccaacaacancaacatatatgcatgtctctcacagctgacgtttctactgaatccaagttgagagacctagatatggaaagaaggaaccc

SEQ ID NO: 3742 - DNA, 298 bp, Glycine max
  unsure (1)..(298): unsure at all n locations; Clone ID: 700558502H1
gggttgaagtggtttaagagattcanaaggtaaggaaattcaaganaaaaaaggcaaagtcataattccatttccatgcgcatggcttccnnacgaaacttcaccgtttgantctcgcgagatgctcgcatccttcgtctcgtccacgcccctgcngtcggactcatggncctctgcacccaggccaacgccactcccttcctgaccttcgtgactgancgtgtcggcgcctccgtgtatgtggctttctccggcgtccatatggccggcgagtccgacccgaactggagaaatttga

SEQ ID NO: 3743 - DNA, 295 bp, Glycine max
  unsure (1)..(295): unsure at all n locations; Clone ID: 700558504H1
angntggaaccattgaaggttgtttcctcaggccaagatcttggatagtaattaacctcactcaaactcgggatcacagaaaccaacaacagttcttgcactgangtttcacgatgttgctggaacttgcacttggtttgtttgtgttagctttgtttctgcacttgctcccacaccaagtncaaaatcaaaagcacttcgccacctcccanaccctccaagcccaaagcctcgtcttcccttcattggccaccttcacctcttaaaagataaacttctccatatgcactcatcg

SEQ ID NO: 3744 - DNA, 297 bp, Glycine max
  unsure (1)..(297): unsure at all n locations; Clone ID: 700558505H1
gnganatctgcgatggcnatggcgcttcacaggctttcatcttcaattgataagcctcnncgccctctcntcaagtnncgggtncactctactacaagtcgtntttgcctgntgaanctgtttacgacaagganngncccggagttncatggccgaancagttgaatgcncacttgaggtcgttgatcctgagattgctgatattattgagcttgngaaagctaggcaatggaaggggctggaactgntnancgtcagaganttcacttctntgtctgtgatgcaagcagttggatc

SEQ ID NO: 3745 - DNA, 297 bp, Glycine max
  unsure (1)..(297): unsure at all n locations; Clone ID: 700558506H1
aacaatattcttgctgagtgtggggccaagtccaatgcaataagaaaagtggcactctttcttcttttctggtctacaatgctatgtagcttggagcggtgttacggtgacagagtgagagtgagagtgagaantgggtctgctttctaacagagtggagagacatgagtcaagcctggtgatcacatctacacttacagagccgttttcacctattcccatcatggcatttttgttgggggaagcaaggttgtacatttcagacctgaaaggaacttaaagtcaatgactgagaca

SEQ ID NO: 3746 - DNA, 300 bp, Glycine max
  Clone ID: 700558508H1
gggaggatacaagaagggtgtgacagaagcaaaactgaaggttgccataaacgggtttggaaggattggaaggaacttcttgaggtgctggcacggtcgcaaagactcccctcttgatgtcattgccatcaacgacaccggcggcgtgaaacaagcctctcaccttctcaatacgattccatcctcggaaccttcgatgctgatgtcaagcctgttggcagcaatgtcatctccgtggatggaaaggaaatcaaagttgtttctgaccgcaaccctgccaaccttccttggaaggacttg

SEQ ID NO: 3747 - DNA, 298 bp, Glycine max
  Clone ID: 700558509H1
caaatgcaaagcatgtcaaccaccatggcttcgttttctcctccgacccatttcttcagccactccttcttcctcgaaaccccgtcttgtctacaagaacaactttttcttctctctcaggtcgaggagtctttctctctctcccttgaaggctgctgcttctgagaacgggtcgggaccgccgtggagcctccgccggagcaggccgtgccggtgccggagccttctctgcctccggtggacaatagttctgtggggaccaatgggtctgctgttgcggttgagagtgaggtggtta

SEQ ID NO: 3748 - DNA, 300 bp, Glycine max
  unsure (1)..(300): unsure at all n locations; Clone ID: 700558511H1
gnnttacncaactctctcctncccctcgcgnccacgtctgtnctcanttatcanggctcnnaattagcctcacaanaaatctttgtaaganatcttcacacnctattttngcatcanttacgctgcctagaccgnntcttcagatttgtggtagaccttcanacattgatttgtacgtcaacccgantctcttctggagcacatagagcannaatatctgctgaanctggaagacaagattgggantttggaagattgttaaaacatgtncttcgncaatgggttcccatctcctgctag

SEQ ID NO: 3749 - DNA, 295 bp, Glycine max
  Clone ID: 700558512H1
cactcataacacaaagcacaaagcaaagctcatccttgagttaaaaaatggcagcagcttcttccatggctctctcatccccatccttggctggcaaggccgtgaagctgggcccatcagccccagaagtgggaagggtgagcatgaggaagaccgtcaccaagcaggttcctcaggaagcccatggtacggcccagaccgagtcaagtacttgggcccattctctggcgagcccccgtcctacctaaccggtgagttcccaggcgactacggctgggacactgctgggtttccg

SEQ ID NO: 3750 - DNA, 293 bp, Glycine max
  unsure (1)..(293): unsure at all n locations; Clone ID: 700558513H1
ctcagcnttcttcttcgctctctcgntctgactgccgccgccgtgcgttcgtctctctctggcgttgactttttttttttgcctgtgagagagtaacgcaatggaacaaccacccaccgangccgtcgaatcgttgtccgtctccgaccctcagatcccccaatcatcaatcccagtccaactcatcttttnactccggangagaaatttcaaattgtgagangcgtcggagaagaatgcattcnggaagacgagctccttaacctcctcaccnaaaaacccgaaccngtttg

SEQ ID NO: 3751 - DNA, 293 bp, Glycine max
  unsure (1)..(293): unsure at all n locations; Clone ID: 700558514H1
ggcggattacaatattcnncnatgntangcccatcttccagcagaggcttatctttgccgggaagcagcttgaagatggaanancccttgctgattataacatccagaaggantctactttgcacttggtgttgcgacttcgtggtggcatgcaaatcttcgtgaaactttgacgggaaagaccataactttggaggttgaaagctctgacaccattgataatgtgaaggcaaagatacaggacaaggaaggtattccaccagaccagcagaggcttatttttgcagggaagc

SEQ ID NO: 3752 - DNA, 293 bp, Glycine max
  unsure (1)..(293): unsure at all n locations; Clone ID: 700558515H1
ctctcgttcgctatggccactgttctcagaacccccaccttccggccaccgcctccgccgcgcgccgcaaagtcgccgaaaccatcgcgcttcgccgtcgtgtccttcagacagagcaccacctgcgggagaaaaccctcntcgcttctctcctccctgccgttccctatgttccctctctacggttcgtcaggttcgttccttcgctttcgacggcgaacaccgaggccccgcaattcaggagccggaggttcaggttctggacccttcagatggtgctgttggtgtaacga

SEQ ID NO: 3753 - DNA, 293 bp, Glycine max
  unsure (1)..(293): unsure at all n locations; Clone ID: 700558516H1
ggcggtacttgggtgcttggctatggtgttagaatgaananagggagggaattattcgttggtagttacagaagccttcaccaaacaccgatttcccccattcagttccagcnnacgatgtcgcattccgatccttcaancagatncttcctacacccccactctaactggaaccctcaagttcaccactacttccttcagagcctacggngccgancacttctctcgnatntccaccggctaacgcgcccttctngctactcctgcatccgagtcagnacgctcaggtcgac

SEQ ID NO: 3754 - DNA, 291 bp, Glycine max
  unsure (1)..(291): unsure at all n locations; Clone ID: 700558518H1
tgctcttgacaagtacgacttcgattctgaagttggcggcaagattaaaggcactgtgttctacacagataacaatggngcagttgttgatatcactgcaaagtcttcggcatatttgccactgcaagaggcgtgcatccacagggttaagcatgttgaagaagaggcttagttcctgggttcaaagaggagtttttgatcattggtgagaactcaatagatgatagcttggtcttgagtttaaggtctcttcagtttgaccttgcatgggaacgttgtagacagcttcaa

SEQ ID NO: 3755 - DNA, 293 bp, Glycine max
  Clone ID: 700558519H1
gtgcctctagggttatcatatctccatttccatttcctctctctcagtttccaagaatcttaagctatgggaaagtcttacccaaccgtgagcgctgattaccagaaggccgttgagaaggcgaagaagaagctcagaggcttcatcgctgagaagagatgcgctctctaatgctccgtttggcatggcactctgctggaacttacgacgtgagctcgaagaccggtggtcccttcggaaccataaagcacccctccgaactcgctcacggcgctaacaacggtcttgacatc

SEQ ID NO: 3756 - DNA, 292 bp, Glycine max
  Clone ID: 700558520H1
aaaatttagatgatagcattggtgatgaaaaacttaaggagctgttctccccttttggtaccattacctcttgcaaggttatgagagacccaaatggcttaagtcgtggatcgggttttgttgcattctcgactcccgaggaggcatctagagcactcctggagagaatggcaaaatggtggtaagcaaacctctgtatgtgactctagcccaaaggaaagaagataggagagctagactgcaggctcagtttgctcaaatgcgacctgttggaatgccaccatctgttggt

SEQ ID NO: 3757 - DNA, 282 bp, Glycine max
  unsure (1)..(282): unsure at all n locations; Clone ID: 700558521H1
gtttgttgttgtaactcgttcttcttcttttgttgttctgtgtttgtgtttgtnttttctctcacctgaaaatgtcttgctgcggtggtaactgtggttgcggaagctcctgcaagtgcggcaacggctgcggaggctgcaagatgtacccagactgagctacactgagtcaaccaccaccgagaccttggtcatgggagtggcacctgttaaggctcaatttgagggtgctgaaatgggtgtgcccgctgagaacgatggctgcaaatgtggaccanactg

SEQ ID NO: 3758 - DNA, 294 bp, Glycine max
  unsure (1)..(294): unsure at all n locations; Clone ID: 700558523H1
ggacatgttctcgataattgcaaggaagacatggagtttttcgatacatggattaataaaggaatcattgatcgcttgagtgatgtagcagataaagatgttgtgcaaataacctacactgaagcgatagatctgctgtcaggagcaaataaganatttgaattcccgtgaaatggggtagtgatcttcagagtgaacatgagcgttatataactgaagaggcattcagtggatgcccagtgataattagagactatccaaaggatattaaagcattctatatgcgacagaatg

SEQ ID NO: 3759 - DNA, 292 bp, Glycine max
  unsure (1)..(292): unsure at all n locations; Clone ID: 700558525H1
ctcagagagtcttcccgtctcttcctcttcacttcttataccgtngcccccaaacgacgccgttttctgttctcttatgtaaacgccgttcgagaacaaaccanaaaaagaaaagaaaatcagttattgccgttgttgttttgtttccggttcggtttatttcaatgatcgggcggcgttgacggttggaccgggcatggacatgccgatcatgcacgacagcgaccgttacgatctggtacgcgacatcgggtccggaaatttcggcgtggcgaggctgatgcaggataaa

SEQ ID NO: 3760 - DNA, 292 bp, Glycine max
  unsure (1)..(292): unsure at all n locations; Clone ID: 700558526H1
ggggtacatcaaattctttatttatgagatgaagtacactggggaagctttgggaagagatcttgagaacgtnaggnagtactacgggagtggaaaaacaaaggaagcatcatggagagaatcacagcttaaagggttgcacaattttctcgttgaaaaagaggaaaaattttgagggccctcaagcatgatttggggaagcattacgtggaggcttttagagacgaggttggaacattaatgaagaccttaaacttggcaagcaagtctttgaaaaattggatggcaggca

SEQ ID NO: 3761 - DNA, 293 bp, Glycine max
  unsure (1)..(293): unsure at all n locations; Clone ID: 700558527H1
cagctccctcgaagactattcttccttcttcttccctgatatggatcccaagcgtcgtggaaacgacaccgctttcaacgacctcctcaattccctcatccacttagacaacaaacaaaccctcatggatcctactcaattccaattcgactcctcccccccaacaagagacctcgtcgtgccattgaagacatccacaatgtcacggtcnnnnnnnnnnnnnnnnnnnnnngccgcctgtgggtcaaggatcgctccaaggactggtgggaccgctgcaaccagccggactt

SEQ ID NO: 3762 - DNA, 219 bp, Glycine max
  unsure (1)..(219): unsure at all n locations; Clone ID: 700558528H1
tcgctatggaatcganaaaccctgcgaggtttacgctggggaagcagtncgtcgcttgccccagaacgccataacaaagaagcagagctccaaaagatggggaanctgttgatcagggtgtgaggttgatgtattcggcattcgaaggcgatgtggatggaattcgcgaggcgttggagtctggtgtgattgtgaattacaaggatattgataatcgca

SEQ ID NO: 3763 - DNA, 290 bp, Glycine max
  Clone ID: 700558529H1
aataccccctcttttgctgcatcagaggagttgtaaattaagagcatggctgcacaagctcttgtatcatcatcttctcttaccttctcagcggaggctgcaagacaaagtcttggaccaagatcactccaatctccatttggcttctccagaaaagcctccttcttgttaaggcagctgctaccccccctgtcaagcaaggatcagacagacctttgtggtttgcatcaaagcaaagtctttcttacttggatggcagccttccgggtgactatggatttgaccctctg

SEQ ID NO: 3764 - DNA, 240 bp, Glycine max
  unsure (1)..(240): unsure at all n locations; Clone ID: 700558530H1
tacacccttccattttctccttctcttcctcccatggtgtaattgctccanctatggccgtggacctcatgacgacgggttgcagccgaaacgacaacatcaatagtttcacaacaaagccgaggaaaatgccgtccaagaagctgcttccggcttagagagcatcgagaagctcatcagactcctctcgcaaacccaaacccaaacccgccatcnaatcaacaacaatagctctaatga

SEQ ID NO: 3765 - DNA, 286 bp, Glycine max
  unsure (1)..(286): unsure at all n locations; Clone ID: 700558531H1
aagtctgccttatctgctgttctagtttattggcattgggatcagtaactgcaattcccaatgcaaattttcatcgggcgccaaggagcactagtgtgcttctggttgttgtctgtgttttttgtggtaacaggattcaacaatgaagagcacaggacagtgaggtagttggcctaggagaatgcgcagactgcaggcagaacaatattaagaataaccacgctttctcaggntacgtgtgacggtagattgcaatcacgacatggacacttcagaacgagagggg

SEQ ID NO: 3766 - DNA, 213 bp, Glycine max
  unsure (1)..(213): unsure at all n locations; Clone ID: 700558532H1
agaagcagaagcaaagggaagcgaattcagagccaccctcaactaaacattgntttattctatgatatagaagcctctccgtcaagttcaaatttatcaaatgaagaattggtaacttaataatctgattttgttaagttatgtagaaaattttcatatagaactattctttatatggcatcaattgtatcagctaccatctcctctatctat

SEQ ID NO: 3767 - DNA, 289 bp, Glycine max
  unsure (1)..(289): unsure at all n locations; Clone ID: 700558533H1
attactacttgcttctcttattactctccccaatattgcctcttgtactttttatgctgattgcccttgaacccttcaagtttcnacacancntacgaaaanaaaanaatatnagnatgcaacagatcnnaattattcaccaatcaaaaccacttgcacatttttagttgaacacaataatttcatctatcactcccgttttagcccccacttgaatactacacagctagggtttactttcctcatttaagctgcatggatccaattgaatttgcgtggtgatggtaat

SEQ ID NO: 3768 - DNA, 290 bp, Glycine max
  Clone ID: 700558534H1
gcggctcttgcttctacaaggatcccttcaaacacaaggttcccatccaaggcctcttcactctttcccaacccaatgcgccttaaagagacttgaggtgacagaattctctgggcttagatccacttcatgtgtcacatatgctaacagtgctagagaatctccttttttgatcttgtagcttcccaactcactcccaacaccaatggatcaactcctgtgaggggagagacagtggccaagttgaaggtggcaatcaatggtttcggacgcattggtagaaacttcct

SEQ ID NO: 3769 - DNA, 288 bp, Glycine max
  Clone ID: 700558536H1
cattgaatgaatgcatacaggtctctggatcacatctagatgaaaagcaagttcggagcattgttgatgagattaaacaagtccttacggccagttcatcaagaaaacatgaaagagcagagagggccaaagaagaggactttgatgctgaagaaagagactactcaatgaagaaaatgagcaagaagaggagctttttgatcaagttggtgattgcttgggaactttgataaaaacattcaggacatctttcttgcctttctttgatgagctgtcctcatacctaac

SEQ ID NO: 3770 - DNA, 255 bp, Glycine max
  Clone ID: 700558537H1
cattgtcactaaaaggaggatactatgactttgttaagggatcttttgagctctggggccttcagtttggccttgcatcctctttctccgtatgaacatcaaccattatcaatgacctcatcttggttccctaagtattctcctatctaaaatgttaaagagtggccaccattctgcattggaagctataggggccatgcttagaggtcgtgtgtatctgcaatgaagaggcctagccaccttcatcaccatatg

SEQ ID NO: 3771 - DNA, 291 bp, Glycine max
  unsure (1)..(291): unsure at all n locations; Clone ID: 700558539H1
gaagaagattatagatccaattaagtattaaatatatgtaattacatatgtaattaatctcctcttctttatttncgtcttttatgtcttctnttttttacaattgtaatagaataagttaggaaagagaaagaataagggttaatttggcctaattgaaattcggagtgaaactcgggatctcgtccaggcttccatggaattgaattaataattcaattccatttctattaataaaagagtgaaagcagaaatttaaatggaatgtatagggtgggggcaacaatatca

SEQ ID NO: 3772 - DNA, 236 bp, Glycine max
  Clone ID: 700558540H1
tggtgacggaccaagatatagcgaaaggggtggagtccctactgcgtcactctgacccaaactccataactacggtaaacggcgtcgttcagcagctggaggccaaacagggttagacctctctcacaaggccagtttcatcagagaccagatcgatcatcttctccggtcacagccacagacatttgctcctcaccctcctccacttcacaaagactattttgcccctcacaccc

SEQ ID NO: 3773 - DNA, 288 bp, Glycine max
  Clone ID: 700558541H1
tttagcttcatccctagctactagctagcactttcacttccgttaatttaacagtagaccattaacttgaaaatttcaaaacaccgcatcaaaattttcttctgaaggcactaccgaagaatggctgtttttgcatcttcatcatctttacaaacccatttcattcctcgctcttggcaccttcttttgaaggtgcacatgatcacaactcgtggtgggtgcgagcgagatcacagaaacgcattggtcaaagattacacacacaggacatagctagagggctgagaa

SEQ ID NO: 3774 - DNA, 264 bp, Glycine max
  unsure (1)..(264): unsure at all n locations; Clone ID: 700558542H1
cttaatttagtaaacanacangccaatcccanatttanaggttcatntccaatatgggcaatnntgtcaagttttacaccattgactattcctagtatagtcttgttagtggttggagtcttagtctctggggctgaagtaggccaagggctttctttgtgtttggagattcacttgttgatagtggaaataacaattacttggctaccacggcacgtgctgatgcccctccttatgggatgattaccctccaagtcatagacc

SEQ ID NO: 3775 - DNA, 285 bp, Glycine max
  unsure (1)..(285): unsure at all n locations; Clone ID: 700558544H1
catcttcctctttttctcaaccaaaaggggttcaattctagctagttctattacatcgtccgcnaccatgaacatggcgatcgtgcttctgttcatggttttcgcagtttcatcagctttagacatgtcaataatatcacatgacaacgctcatgcggatgggccacgaggcgcaccgacgacgaggtgatgtcaatgttcgaggagtggctggtgaaacacgacaaggtgtacaacgcgctcggtgagaaggagaagaggtttcaaatcttcaagaacaatctg

SEQ ID NO: 3776 - DNA, 284 bp, Glycine max
  Clone ID: 700558545H1
acaaaatagaaggcattgatcgctgaagtgataattgagatgaacagcagaaacattaactgttttttaactatgccttctttgtatctggagcttctttcccacactgaattgaaagttgttgatggtgtccttttaatgtgattttgctcctctctctttttccctgctgtaattttaatcattttcagggatcatgttcctttgtgcagttgcaaactccaaaccaacatgtcaaatattgctctcagtttaatatatagagaatgattcccttgtaaaaa

SEQ ID NO: 3777 - DNA, 286 bp, Glycine max
  unsure (1)..(286): unsure at all n locations; Clone ID: 700558546H1
gnagaacaagtagttgagaactaagaaggagaaacaaatggcttcctcaatgatctcttcccccagctgttaccactgttcaaccgtgccggtgccggcatggttgctccattcactggcctcaagtccatggctggcttccccaccaggaagaccaacnatncntacctccattgctagcaacggtggaagagtgcaatgcatgcaggtgtggccaccagttgggcaagaagaagnttgaggatctttcctacctgccagacctgatggtgcccaattggnnagg

SEQ ID NO: 3778 - DNA, 118 bp, Glycine max
  unsure (1)..(118): unsure at all n locations; Clone ID: 700558547H1
ttttttcaagtgaaaaanaaaacanttncttgttntctctncagcntttcttcttgagatcttaatatcacatngacttaaaaaaangaaganggggggncaaagttgagncccgngg

SEQ ID NO: 3779 - DNA, 283 bp, Glycine max
  Clone ID: 700558548H1
ggcaaaagcaccaggaggaatcttgaatgtaccttggacatttgcatttagcttttgaaacattggttagtggagtctcttgtgctcgctattttttacgttagtcttggttgcatctgaatcatagctcaggattaaggctctagaattgtatagttactaaattctattttttttcatacaatagttgaattttggatttccagaatgtatgtttgtgtagtatctactttctgccctagagagtctataattaatggctataataagacgaatggcatcc

SEQ ID NO: 3780 - DNA, 284 bp, Glycine max
  unsure (1)..(284): unsure at all n locations; Clone ID: 700558549H1
ctgagncnnatngcntantcatntacatttactaatcaatgttntgnncnccnngngctngaaaggttntgtgtgtcaccggcgcgtccggttacattgcttcctggatagtcaaattcctcctccttcgccggctacaccgtnaaggccaccgttcgcgcacaagtgatccgaaaaaaacaaaccacttgattggcctcgacggtgctaaggagagatgcacctctacgaggcgaatcttctcgaagaaggttcctttaactctgtcgttcagcannaagcgc

SEQ ID NO: 3781 - DNA, 285 bp, Glycine max
  Clone ID: 700558552H1
agaagaacaagtagttgagaactaagaaggagaagcaaatggcttcctcaatgatctcttccccagctgttaccactgttcaaccgtgccggtgccggcatggttgctccattcactggcctcaagtccatggctggcttccccaccaggaagaccaacatgacattacctccattgctagcaacggtggaagagtgcaatgcatgcaggtgtggccaccagttggcaagaagaagtttgagactctttcctacctgccagaccttgatgatgcacaattggcaa

SEQ ID NO: 3782 - DNA, 285 bp, Glycine max
  unsure (1)..(285): unsure at all n locations; Clone ID: 700558553H1
ctgcttcaacattgcggaagcagaagaagcgccgcagctatggtgnagtactccagagaacccgacaatcccaccaagtcctgcaaggccagaggcgctgacctcagagttcattttaagaacactagggagactgcctttgccatcaggaagttgcccttgttaaagctaaacgatacttagaggatgttttggcccacaaacaggctattcctttccgacgcttttgtggtggtgttgggaggacggcccaggctaagaacagacactccaatgggcaaggac

SEQ ID NO: 3783 - DNA, 287 bp, Glycine max
  unsure (1)..(287): unsure at all n locations; Clone ID: 700558554H1
ancagagcatagtagcatcttcattcatctctacagcacaaanaagnaaganatccaacccgtgaagaaagcaaagcannnnnnnnnnnnnnnnnnnnnncgtttacccccttttgtctgcgcgtgcgtgtggatctggcaaganaacaaggaagggaggttcattgcggatctgaattcgcagtgttagggctttgaagggtttttccattttcttcaatggccacgccctttcccattcccgtcaccgcagctcaggttggaacgtacttcgtaggacagtacta

SEQ ID NO: 3784 - DNA, 255 bp, Glycine max
  unsure (1)..(255): unsure at all n locations; Clone ID: 700558556H1
tcttagatctcttctttctctacgccgcacgccgaaaccatggccgganaaggagagggtcctgctatcggaatcgatctcggaaccacctactcttgcgtcnntgtgtggcaacatgaccgcgttnantcatcgccaacgaccaagggaacagaacnncgccgtcttacgtcggattcactgacaccgagcgtctcatcggtgatgcggccaagaatcaagtcgccatgaaccccatcaacaccgtcttcgatg

SEQ ID NO: 3785 - DNA, 284 bp, Glycine max
  Clone ID: 700558557H1
aaaacgagaagtaggatctgttgttcttcgttttctacgaggaagcaaaataacaataacagaggaagaaagaaaatcacacagtttcagtttcagtttcagcttcgctttgtagaaatggctactctatcaagcttcattgctacgccgaagaatcccagacccactttctctcaggttcctcattcatgtcgatggacaaatgcttcttgaaaatcagcaccagcggacactttacagatttctctttaagggctaaagcaacatgtaaccaaccattgtta

SEQ ID NO: 3786 - DNA, 283 bp, Glycine max
  unsure (1)..(283): unsure at all n locations; Clone ID: 700558558H1
ccctactcattctccatacctcaacgaagaggttaaagagacggcaacactttgctgtccgccttgaccgagcagagcttcgtcttggccctcgattttgccctaaagtactctcagtcacaacagacacnnnnnnnnnnnnnnnnnnnnnnaatggcccgaagcagaccaaggctgagaagaagatcgcttacgatgcgaantgtgcgacctaatggaggagtacggccagatcctcgttgtgaactccgataacgtgggatcgaaccagctccagaacatt

SEQ ID NO: 3787 - DNA, 282 bp, Glycine max
  unsure (1)..(282): unsure at all n locations; Clone ID: 700558559H1
tctgtaacgacgctggcgtggattttatccatgctaaagcaaaacacctgactctgaacgccgtcgtttcaccgtctctcgttgatgttcacccttgctttaaggaggagtttttcgcttacgacatgacaatctcctacgccggccacaacaccccctcgcngccgtccaggtgacggaactcgccgacggntcttcgtcggctgcaccgtcaaccactccgtcaccgacggcacctcgttctggcacttcttcaacacgttcgccgccgtcaccaaaggc

SEQ ID NO: 3788 - DNA, 281 bp, Glycine max
  unsure (1)..(281): unsure at all n locations; Clone ID: 700558560H1
ctcactgnttgagtgaaancagtgccagtgaaacctttnnntccttcctcgccccctttgtcttccaatccaatcaaaaccaaaacacctacgctgattctcatgttcaattacggtcntntgctcaattcaattccccnctccgttgcttaggtccttctcaatttctcgcagatttagccgttcatggacgccgccgtgaagccggagacggaatacgcggccgtttcgacggatcagcctcggaaagtttcggtggtgaatggttacattgtctacac

SEQ ID NO: 3789 - DNA, 277 bp, Glycine max
  unsure (1)..(277): unsure at all n locations; Clone ID: 700558561H1
tttgctctggcctncattcaggagccaacctttctgccagatcctgcaggatttagcagtttcatatattatatacgttctgcttagacatgttgagtggttatttggtgatatcattgccctatatnttagatngtcctgtnttattattcatcggattgttatntcntnattcagctgnaagtnaccttantagaatagatccnttcttccatagctatctgcaaatntcattagtntcatagaatggtatccnatcctaaganatattttcatc

SEQ ID NO: 3790 - DNA, 292 bp, Glycine max
  unsure (1)..(292): unsure at all n locations; Clone ID: 700558566H1
caagcctctactatactgcttcagcttctgcttctagaaaattcagtgntgaancatgggnttcggctacnctctccggtagccaaaccagncctttcaggcaaatggggaaaggcttctctganttntntggcttccgaaggctcatcaaggccttcnttcctntcntggaaaatctcagaaggntttcaatccgtnaatggcttacagacctnatgcagtttggaancagtggagggtacaagaagggtgtgacggagcaaaactgaaaggttgccattaaccgggttgg

SEQ ID NO: 3791 - DNA, 284 bp, Glycine max
  unsure (1)..(284): unsure at all n locations; Clone ID: 700558567H1
atactcattaaagtccacacacacagagcaanactgcactgtgtggaaacgaaacatggcaagagtggtggcactccaacagaaccaactatctttctctaccttagcttcctctctttctgacttcagtggaaccagacttcaaactcaacttcagtcaagagaaagcaatgccatccaaaagggtctttctacgtctccgcatcgagcaccaagaaaatcctaataatgggaggcaccaggtttattggtgtgtttttgtctaggctccttgtcaaagaggg

SEQ ID NO: 3792 - DNA, 87 bp, Glycine max
  unsure (1)..(87): unsure at all n locations; Clone ID: 700558568H1
gttatccagacagtctgattgggaacattcctaattnttctatttactatgctgcaaacaacccccttnctgaggctnccatcggcc

SEQ ID NO: 3793 - DNA, 282 bp, Glycine max
  unsure (1)..(282): unsure at all n locations; Clone ID: 700558569H1
acaagccaagtgacgatagagntnanaagtcnnagacaatgtcagggatcattcacaagattgaggagacccttcatgtgggacgccacaagaaggaggaggagcacaagggtgagcagcaccatggtggagaatacaaaggggagcatcatggtaacacagtactgaatacaaaggagagcatcatgttggtgagcacaagccggagcaccatggaggagaagagcacaaagaggggttcctagacaagatcaaggacaagatccacggcgaggagggtgg

SEQ ID NO: 3794 - DNA, 112 bp, Glycine max
  unsure (1)..(112): unsure at all n locations; Clone ID: 700558571H1
tgngcnnacagcagcagnagcnccaaacgcatgttcccatattganacggntctgnagangtgacagacncaatnctaggtttncctttactccgattncactcccatagcg

SEQ ID NO: 3795 - DNA, 283 bp, Glycine max
  unsure (1)..(283): unsure at all n locations; Clone ID: 700558572H1
tggtggnaagtttaaattgggaaggaaaattggtagtgggtcttttggggagctctatttagctgtccaatgtacaaactggagaggaggtggctgttaagctggaacctgtgaagaccaggcatccacagcttcactatgagtcaaaactgtatatgcttcttcaaggaggaacggggattccccacctcaagtggtttggagttgagggagactacaatgtcatggttatcgaccttcttggaccaagtctggaagatttattcaattattgtaatcggaa

SEQ ID NO: 3796 - DNA, 279 bp, Glycine max
  unsure (1)..(279): unsure at all n locations; Clone ID: 700558575H1
ctttaaatcccaatattttctgcgcgaattttgctagaaaccgttagtgggtatcctcaaaatactagattttcgnttcgtttggtgaacggatttttaggtgtgattattacgttttntttttgtncaacaagctatggaggtttcggtgattgaagcncacaagcgaactggcgcgcgtctgaattggcttctanggaagttggatttngtantctgaagaacaatttaagggttttgaatggtagagttagttttggtaggaataatatacggggg

SEQ ID NO: 3797 - DNA, 279 bp, Glycine max
  Clone ID: 700558576H1
accacctctgctgagcgagaaattgtccgtgacatgaaggaaaaacttgcatatgttgccctagattatgagcaagaactcgagactgcaaaaagcagttcatcagttgagaaaagctatgagcttcctgatggacaagttatcacaattggggcgagagattccgttgcccagaagttcttttccagccatctatgattggaatggaagctgctggaattcatgagaccacctacaattctatcatgaagtgtgatgtggatatcagaaaggatctat

SEQ ID NO: 3798 - DNA, 280 bp, Glycine max
  Clone ID: 700558577H1
gtttctctctctagcttggacgagtgaattagattcatcatcaagatgtcgtctctgatagcagaagatgtgaagagcagatcagaggtgtaccacggggacgaaatgtgccaagtgaagtccaaggagcttctcaaggaaatcgccctccccacggccttcttcccctcaaggacatggaggagtgcggctacgacagacaaaccggcttcgtctggctcaaacaaaagaagagttacacccacaagttcgacaagatcggaaagcttgtctcctacgc

SEQ ID NO: 3799 - DNA, 270 bp, Glycine max
  unsure (1)..(270): unsure at all n locations; Clone ID: 700558578H1
gagatagtttctcaccaaacacacacttctcttctcttctcttctcttcattttctgtggttcncactttcttttctctnatcttctaatctcttattttcntcccccctctgttactccccgcttctctgaatccctttctgtnatcatctgtctttcnactcgtgattttttgggtttgcctcaccaaaaagattcanactttgaaaatttttctcgaaagccaggtgttttcagaatcgagatccagcttnttttntgtttgntttg

SEQ ID NO: 3800 - DNA, 281 bp, Glycine max
  Clone ID: 700558579H1
gcatgcacacacttgcatagttttggaaaccaagaatttttgaagggtagcatcaacaagaagttctggaaatggagatcaccaatgtcagcgagtatgaagctattgcaaagcagaagttgccaaagatggtgtttgactactacgcatctggtgcagaggaccagtggactctgcaggagaacagaaatgccttttccagaattttgtttcggccacgtattcttattgatgtgagcaagatagacatcacaactactgtcctgggcttcaaaatatcc

SEQ ID NO: 3801 - DNA, 279 bp, Glycine max
  unsure (1)..(279): unsure at all n locations; Clone ID: 700558580H1
atcttgactgggttcaagatgcatgctcgtggttggatttccatctattgcatgccacctncgcccagcatttaagggttctgcccctatcaatctttctgatcgtctcaatcaggtgcttcggtgggccttaggttcaattgagatctttcttagcaggcattgtcccttgtggtatggctacaatgggaagttgaagcctctgatgaggcttgcttatatcaacaccattgtctacccatttacctcaatcccattgattgcntactgtacgcttct

SEQ ID NO: 3802 - DNA, 278 bp, Glycine max
  Clone ID: 700558581H1
gtctgcagagtgcagagccttctctcctctattttggcttccaacctttttgctccattcattctcaacaacaaaccaatctctatattttgcttagacaatgagggggagcttgtggcaacttgggcaatcgatcactcgccgtcttgcccaggagataagaaggctgttgctcgccgatgttttgcctcagaagctgagctgaaaaagacagtgtttcatgacttccatgttgctcatggtgggaagatggttccattgctggatggagcatgcca

SEQ ID NO: 3803 - DNA, 260 bp, Glycine max
  unsure (1)..(260): unsure at all n locations; Clone ID: 700558582H1
gagagggctatctgaaaatcgcatngataagaaagtttaatgatggaagcgggaactgctctcagtctccgactccacactcgcattcccattcccatcaacactgccaattcaaataccttattattccaactcgcttcactctttcttctcattctccttcttccttttccgcttacagttacagaggccccacaccaaaacgccccttcctcgccgactgggtctcccaaaacgacgacctcgttcgcaccctccca

SEQ ID NO: 3804 - DNA, 279 bp, Glycine max
  Clone ID: 700558583H1
acatgggccattggtagggatccaaattactgggatgacgcactcgagtacaagccggagaggttcttgttctccgacgacccgggcaagagcaagattgacgtgagggggcagtactatcagctcctgccctttgggagcgggagaagaagcgccccggagcctcgctagcgttgcttgtcatgcaagcaacgctagcgagtttgatccagtgcttcgactggatcgttaatgatggtaaaaaccatcatgttgacatgtctgaggaagggagggtga

SEQ ID NO: 3805 - DNA, 277 bp, Glycine max
  Clone ID: 700558584H1
ccagagagcgcgtcttaataaacgctcttctctgaaaacccccatttcttttcttctttcttcttctctttcgcttcttcgatcttcgatcttcgtcgctgaaaatgagagagtgcatttcaatccacatcggccaggccgggattcaggttgaaacgcctgctgggagctttactgcctcgaacacggcattcagcctgatgggcagatgccaagtgacaagaccgttggtggaggtgatgatgctttcaacaccttcttcagtgaaatggggcag

SEQ ID NO: 3806 - DNA, 279 bp, Glycine max
  Clone ID: 700558585H1
atcgatgtcagctacgaggacatcgccgccaacgaagccgactttgttaattccgttggggggcttgtgaggaacctgaagcagaacaagctcattactgtggcttccttcgcaacaagcgctgatgccgccaacaacaaattctacaatctctgtacgcagaatatgctactttctttgacactgtggtgtttctgagctgggtagggtttactccttctcgcgccaacccagttgcgagcttggaggagaagatccttgccgtggccaacgagtata

SEQ ID NO: 3807 - DNA, 280 bp, Glycine max
  unsure (1)..(280): unsure at all n locations; Clone ID: 700558586H1
cacatctttgagtatcatctctacaccagctagacatcccaacagttgcaactcattcaagtgggttatcctgtaaagcttggaagtggagttgctgctgccagtgcatacttacagaacactattcctatgatcccttccaggatttgagtcaaaatcattcttgtctttacttcntttttctgctctttcagaaattctgtaaaatatatattaccctcttttacactcctttgaagatgaacgtactttctactttcagctttaatgcattgcttct

SEQ ID NO: 3808 - DNA, 276 bp, Glycine max
  unsure (1)..(276): unsure at all n locations; Clone ID: 700558590H1
cgcggtcaagttctcttgagtgaaaaggcagtagctaaccctgcagatatggannncttattgtctaagtgtgttgcacaactcttggatctcctataccgtgttgaagatgctgntattgaagacattgtagaagtgctctgcaattttccacagttgaagttgaanatacggggaaacttgagtccacgaaggtagttgctgctagtatgctaggaaagagcttacaagctggggaagttgttttcgagagggtgtntaatgctgtctgtncag

SEQ ID NO: 3809 - DNA, 274 bp, Glycine max
  unsure (1)..(274): unsure at all n locations; Clone ID: 700558592H1
gcattgcaagcgctctctttctttgcttttccttccccctttcagtttcttcaacgctgcaactatccatggcaaaccgctggctcagacccgaggtgtatccactgttcgctgcggttggtgccgctgttgggatctgtggattccaattgttcgtaatatctgcatcaaccctgaagtcagggtgaacaaggagggaagaaaggcaggagtgttggagaatttgctnngggagagaagtatgctgagcatttcctgaggaagtatgtgcgca

SEQ ID NO: 3810 - DNA, 279 bp, Glycine max
  unsure (1)..(279): unsure at all n locations; Clone ID: 700558593H1
gcattgcangcgctctctttnttngcttntccttcncccttncagtttcttcancgctgnaactatnccatngcaaaccgctggctcagacccnaggtgtatccactgttcgctgcggttggtncccgctgttgggatctgtggantccaattggntcgtaatntctgcatcaaccctgaagtcagggtgaacaangagggaagaaangcaggagtgttggagaactttgctgnagnnagannagtatgctgagcatttcctgaggnantatgtncgca

SEQ ID NO: 3811 - DNA, 275 bp, Glycine max
  Clone ID: 700558594H1
ggcattgcaagcgctctctttctttgcttttccttccccctttcagtttcttcaacgctgcaactatccatggcaaaccgctggctcagacccgaggtgtatccactgttcgctgcggttggtgccgctgttgggatctgtggattccaattgttcgtaatatctgcatcaaccctgaagtcagggtgaacaaggagggaagaaaggcaggagtgttggagaatttgctgagggagagaagtatgctgagcatttcctgaggaagtatgtgcgca

SEQ ID NO: 3812 - DNA, 274 bp, Glycine max
  unsure (1)..(274): unsure at all n locations; Clone ID: 700558595H1
ggcattgcaagcgctctctttctttgcttttccttccccctttcagtntcttcaacgctgcaactatccatggcaaaccgctggctcagacccgaggtgtatccactgttcgctgcggttggtgccgngttgggatctgtggattccaattgttcgtaatatctgcatcaaccctgaagtcagggtgaacaaggagggaagaaangcaggagtgntggagaactttgctgaagggagagaatatgctgagcatttcctgaggaatatgtgcgca

SEQ ID NO: 3813 - DNA, 294 bp, Glycine max
  Clone ID: 700558601H1
gagaatgatgagggaagaaggttctgataagaaaaattcgtactgggacaatctttggggcaaacagaaagactatcaaagttcagatgaggaagttgaagaaagagcaaaaagagctgcttcagcggcacgaagatggagggaatactcaagtagaggtgttgataagcctcccacatttaaacttccagaggcaagccttggcaaggacaagtgaacagtacttcatttaccttctactatatcatttagtcccgtgtaattagttcatttatagcctcctaagttaaacca

SEQ ID NO: 3814 - DNA, 289 bp, Glycine max
  unsure (1)..(289): unsure at all n locations; Clone ID: 700558604H1
cacccacgcggctcttgcttctacaaggatcccttcanacacaaggttcccatccaaggcctctcactctttcccaacccaatgcgccttaaagagacttgaggtgacagaattctctgggcttagatccacttcatgtgtcacatatgctaacagtgctagagaatcttccttttttgatcntgtagcttcccaactcactcccaagaccaatggatcaactcctgtgaggggagagacagtggccaagttgaaggtggcaatcaatggtttcggacgcattggtaga

SEQ ID NO: 3815 - DNA, 288 bp, Glycine max
  Clone ID: 700558605H1
aaagatctttgcaaaaaccccgtcgatggcttttctgccggtttggtcgacgaaaccaacatttttgaatggagtgtaactataattggacctcccgatactctttatgaggggggatttttcaatgccattatgagctttccacccaactacccaaatagtccgccatcagtgaaatttacctcagagttatggcatcccaatgtgtaccccgatgggcgagtttgcatatcaattcttcatccacccggtgatgacccaaatggttatgagcttgcaagtgagcgc

SEQ ID NO: 3816 - DNA, 287 bp, Glycine max
  unsure (1)..(287): unsure at all n locations; Clone ID: 700558606H1
aagaaattagaaatatttattcattgtcaccaaatcttgttccctgcaaganaaagaaagaagggagagaagaagttgttgggttgagttggattggatttctaatctaatctataccttncttttttcctatgcttttaaggcacaaacccttctttcttccctcttctnnnnnnnnnnnnnnnnnnnnnnntgcctttaccctttagggaaggaagaaggaacaactatactactattatccttattattgttattattgtaattaatctttttatntagttatg

SEQ ID NO: 3817 - DNA, 157 bp, Glycine max
  unsure (1)..(157): unsure at all n locations; Clone ID: 700558607H1
aggcaattccttcattattcccttcaaattcaccccccccccttccgacaactncggctactttcccctttccctnctngggttgggcggancaaatggtncgaacttccctcgnctcagggncaggancgnctgnattgcancannancttacaca

SEQ ID NO: 3818 - DNA, 292 bp, Glycine max
  Clone ID: 700558608H1
gttccctcagacatatctgtaacgctgcttcttctgtgaggcatcaatggagacaaaagctttgtccttcgctctgtctctccaatgacctcaccaacaaccgcttcacttccaatacgccacatgctgccgccaaagtttccgtctttaccgtcagatgctcttcttcgggtagtggagagaggccttggaagaattcagatgctagacttgtgcttgaagatggttcaatttggagagcaaaatcgtttggtgcttcagggacccaagttggcgaggttgttttcaatac

SEQ ID NO: 3819 - DNA, 292 bp, Glycine max
  unsure (1)..(292): unsure at all n locations; Clone ID: 700558609H1
caaatggcgatgaacattcagctgacaccttttatttctaatccccgacaaggacaactcctgaaccttaattttccaaacaaacattcaacnctcacttgttgcgctattcgtaattcagacctcaaactatctcagactcagagacttgtccatcacttcaatcccaaaactcccatagaggaagccgttactcccccaacatcatggtacactcatccctctttcttccaccttgagctcgatcgtgtcttctacagaggctggcaagttgtgggatccacagagcaga

SEQ ID NO: 3820 - DNA, 279 bp, Glycine max
  unsure (1)..(279): unsure at all n locations; Clone ID: 700558610H1
aaaagagggagaagaacggttgttgactctgaaggacacgtgtaagccgctacttgtcccttgctttgacctcaagagctctgcgccgttcgtgttctcccgagccgacgcgtccgagtcaccgagtttcaacttcgagctttggaaggcgtgccgcgccacgtcagcgactcctggcgttttcgcgccctttcacttctcctccgtcgacggaaaaacctcgtgcnccgccgtcgacggcggcttagtgatgaacaatccggccgcggcggcggtcag

SEQ ID NO: 3821 - DNA, 286 bp, Glycine max
  unsure (1)..(286): unsure at all n locations; Clone ID: 700558612H1
gnaacatgcgttgcgctaaagtgttgtatttttaaattacagaacaataccataactctgttatttaaaaatgtacacctgtttatgtggcgattctacacattttttctttgataagatgaggctaagaaacatgcgttgcgctaaagtgttgtattttcttggacaataaaccctcttggttggatcgtgaaagtttgttaaatgagcaaatttcatgctttcaaaagtttatgcacttttggaagtggtttgctctgtcatatgaactcagttccaaggtttt

SEQ ID NO: 3822 - DNA, 286 bp, Glycine max
  unsure (1)..(286): unsure at all n locations; Clone ID: 700558613H1
ggtaattggttgtaatagcaaaaagcnaaggaaggatggggaacacgttctgcttgttctgtggttgcnttgctcaatccagcgtcggcgtcgtcgaacagtggggtcgcttccaccgcctcgnccaacccggcttccactttttcaaccctctcgccggcgaatgcctctccggtatcctctccaccaggatctcctccctcgatgtccgcatcgaaaccaaaaccaaggacaatgtgtttgtgcagttgctgtgttcgattcaataccgagtgattaaggaaaa

SEQ ID NO: 3823 - DNA, 286 bp, Glycine max
  Clone ID: 700558614H1
gttagggttccttacacgatggagcggttgaagtgggcgcaactgggtgagaggctgaagaccggtggggcccagatggggcgaatggtgagcggaaaagtgaaggagatgcttcaggcgccgacgccggagtccaagatggtggacgaggccacgctggagaccatggaagaacccaattggggcatgaatctcagaatctgtggcatgatcaacagcgaccagttcaacggctctgaggtcgttaaggccatcaagagaaagatcaatcacaagagccccgtcg

SEQ ID NO: 3824 - DNA, 286 bp, Glycine max
  unsure (1)..(286): unsure at all n locations; Clone ID: 700558615H1
cttttgattccatttctgggaattctttgcttgaccattcttccctcttgagaaattcatatcagacaccttcagctggaaaccttggtagtgcaggggacattgaatttatggaccctgctattatggcagttggcaaagggagacttcaaggtgcactgaacagtccggcactggacattcgatctaatttcatgccacaattaaattacttgaaaatgatgctagactacaattattgatgcaaagatctcttgtaccacagcaaaaccttagattttcgana

SEQ ID NO: 3825 - DNA, 287 bp, Glycine max
  Clone ID: 700558618H1
gaacacccacatctatccggaattcgttgttagcttcaaagtctcatctgatgctgaaggtcatttttgtggaagtgagggtaagaatgtttctggggttaattcagcctgtcagggtcctcatggcttgttacattcagaatcttctacagtagataatggaaaagctcctagtatggttgctagcaccccaaaagttccaaaatccccttggatgccttttcctttgcttcttggatgctatcagaaatcaggttcctcccaagggtatggatgtaatcaaaata

SEQ ID NO: 3826 - DNA, 288 bp, Glycine max
  unsure (1)..(288): unsure at all n locations; Clone ID: 700558619H1
ctcacattgtgctgctgcgccactcaggatggtggaacctgcatatactgtgacattctgacagtgnaaccactggcggaagataaatcgtctactnntcctgaaatagcnattggcattgatatnggcacatcacaatgtagtgtngctgtgtggaatggntcccaagtggagcttttgaagaacacnaggantcnnaagattatgaaatcatatgtnaccttcaaagataacatcccttctggtggagtncagcagtcaactctcccatgaggacgnnatgtngtt

SEQ ID NO: 3827 - DNA, 286 bp, Glycine max
  unsure (1)..(286): unsure at all n locations; Clone ID: 700558620H1
aatccctaatgcgccttctgcgttcaattctcagagctacgttggtctcagagcgccactgaggaccttcaacttttcttctcctcaagctgccaaaattcctcgctcccaacgccttttcgtcgtcagagcctccgattcggagttcgaagccgncgttgtcgccggtaaggttccgccggngcctcccgtnccgcccagaccggcggctccggttggaacaccggtggttccttcacttccacttcaccggcgtcctcgtcggaaccggaagtcgcggcgcttt

SEQ ID NO: 3828 - DNA, 287 bp, Glycine max
  unsure (1)..(287): unsure at all n locations; Clone ID: 700558621H1
aaacagagcagagcgaccttgaagagctatggctgtcggaaagaataagaggatttccaagggaaagaagggtggcaagaagaaagccgctgatccctttgccaagaaagactggtacgatatcaaggccccttccctcttccaggtcaagaatattggcaaaaccctcgtctctcgtacccagggaaccaagattgcatccgaaggactcaaacatcgggtttttgaggtctcattggctgatctccaaggggatgaagaccantccttcaagaagattcgtttga

SEQ ID NO: 3829 - DNA, 285 bp, Glycine max
  Clone ID: 700558623H1
tgatctcaagacaaggagttggcggaaaatagaggggatgtatccatatgttaacgtgggtgttcaggcacctccacttgtggctgttgtggataatcagctatatgcagttgagcatctgactaacatggtgaaaaaatatgacaaggaaaagaacacctggaatgaattggggaggcttccagtcagggcggattcttctaatggttgggggttggctttcaaggtttgtggagagcaacttttggttgtgggtggacaaagggtccagaggtgaatctattg

SEQ ID NO: 3830 - DNA, 226 bp, Glycine max
  unsure (1)..(226): unsure at all n locations; Clone ID: 700558624H1
gctntnggnaagnntaanaggatttccaagggaaanangggtggcaaganganagccgntnatccctttgccaagaaagactggtacgatatcaaggcnccttccctcntccaggtcnngantattcgnagaancctcgtctctcgtacccagggannnaagattncatccgaagnctcanacatcgggtttttgaggtctcattggctgatctccaaggggatga

SEQ ID NO: 3831 - DNA, 288 bp, Glycine max
  unsure (1)..(288): unsure at all n locations; Clone ID: 700558625H1
gagaatgttgaatccaacaggcgtgctcttagggagctgcttttcaccgctcccggtgctcttaaatatctcagtggtgtcatcctctttgaggaaactctctaccagagcacagctgcaggcaagccctttgtggaagtcttgaaggaggctggtgtgcttcctggcatcaaggttgacaagggcanagttgagcttgctggcactaatggagaaaccaccactcagggtctagatggccttggtcagcgttgcgccaagtactatgaagccggtgcacgttttgcc

SEQ ID NO: 3832 - DNA, 286 bp, Glycine max
  unsure (1)..(286): unsure at all n locations; Clone ID: 700558626H1
caccaccaccatgacccttcctcaatcatttggctgtggacttgtgcaagcacccttggtgacaagctctggtcttcttactaaagtttggagtgttatctcttctcgtgatgaagacatagtttcatactcaggaaataatggactgtccttgaaagtttctgaggattcgggtttgacggttgttgcgtttgaggtcaacccggattttgatcttcaatctacagtngtttctttctctgatcccaaggngaataatttgaaccgctttgngnntcnttgtacc

SEQ ID NO: 3833 - DNA, 288 bp, Glycine max
  unsure (1)..(288): unsure at all n locations; Clone ID: 700558627H1
ggnagtttcttctgcntctgcttcctccaaacttatactattcccccatgcttcatcttcttcncttatctccacanccttccgttccnccaccaacacccacnaantatcccctctctcctccnccttcctccaccccaccaccgtcctccgccgcncnccctnctcnaccactnncaccacctccccgcgcnntgccctcaccgtccgngcngncngnggcaagttcgagcgcaagaagccccacgtgaacatcggcaccatcggccacgtggaccacggcaagac

SEQ ID NO: 3834 - DNA, 284 bp, Glycine max
  unsure (1)..(284): unsure at all n locations; Clone ID: 700558628H1
cttctttccctaattgacaagatccttcctgtctacagggaggntgttgctgaattgaaggcagctggtgctacttggatccagtttgatgaacctacccttgtgaaggatctcaanacccaccagttacaagcatttacacatgnctatgcagagctagagtcaagtttatctggttttaatgttctgattgaganatactttgctgatgtccctgctgaagcatacaaaacactcacctctttgaaggctgttactgcatatgggtttgatattgttcgtgg

SEQ ID NO: 3835 - DNA, 259 bp, Glycine max
  unsure (1)..(259): unsure at all n locations; Clone ID: 700558629H1
cgtctcttttctttcccctntgttaggaacaacaccacgccacnnttgtttacgaacnncgtcgacttgatgactcatcacaacgccaccaccaccgcctaacgacctagagcaccttctctctcctctaattggccattgcttaagttgacttgctgcgaaggttgctttgatcatttgaagcgcctgaaaatcgttgtgcgaattttgagggttctgtncttgtaatccgaaaaggccgcgattcggaggcgggtgt

SEQ ID NO: 3836 - DNA, 285 bp, Glycine max
  unsure (1)..(285): unsure at all n locations; Clone ID: 700558631H1
ggggcttctgtctttcccatatgatggaacctactctactgattttattgaggagtgggtcaaaattggcttgcctgcaaaggcaaaggtgaagacacaacatggggatgcaccttttgctgagttgtgctcacactgtgagaaggaagctgtgaatgtttcccttggaaaccttctaacatacccatttgttagagatggcttggtgaacaagacattgtcactaaaaggaggatactatgactttgttaaggatcttntgagctctggggccttcagtttggc

SEQ ID NO: 3837 - DNA, 292 bp, Glycine max
  Clone ID: 700558632H1
ggagctagtagaagggtcatcataccttgggcaaccacttccattctcaatcaccacactgatctggatcgaggtactcgtaattggctacatagagttccagaggaatgcagagctcgacccagagaagaggttgtacccaggtggcagttacttcgacccattgggcctggcctcagacccagagaagaaagccacccttcaattgggcggagatcaagcacgcccgtcttggccatggtgggcttcttgggctttgcagtccaagccgccgccaccggcaagggcccgc

SEQ ID NO: 3838 - DNA, 287 bp, Glycine max
  Clone ID: 700558633H1
cacactgcctcttcctctcagattcaggttccaactcttctctctctcgccgtctaggtttttctctcaaaatttcgaaaccccgattttctctcaattcgaatctgcgattcatcgtaacctaaattattagatagttatattatctctctgcgtttctttcagcaattttctattttctcctctcatggcttcagattccaaaaaggatttccctgctgatgacaaagctggaacagaagagagtaaaacatccaaagatgagacttcatctaaagatctccagc

SEQ ID NO: 3839 - DNA, 284 bp, Glycine max
  unsure (1)..(284): unsure at all n locations; Clone ID: 700558634H1
gtgaagcgggtctactatccaggcttgccgagtcaccctgaacatgagcttgccaagaggcagatgactggtttcggtggtgttgtcagttttgaggtgggaatttgacaagttgctattcaaacatgtggtttcctaataacactatttttnttnncttttatcaagaatggngtattggataacatcatgtgccatatttttttnatagttaaattgccaatattgcagattgatggagatctacataccacaataaaatttattgctncattgaaaatccc

SEQ ID NO: 3840 - DNA, 285 bp, Glycine max
  Clone ID: 700558635H1
ctttggtgaccacaacaacaataacaatggctgcctcactacaagctgcagctaccttcatgcaacccaccaaggttggcatagcctctcgcaacctcaaatctacacaatgcatttctaaggcttttggcttggaacctgctgcagctaaactcacttgctcccttcagcctgatctcaaagaatttgctcaaaaatgtgtcgacgctaccaaaattgcaggattcgcccttgccacctctgctctcgttgtttctggagcaagtgcagaaggtgttccaaaaa

SEQ ID NO: 3841 - DNA, 283 bp, Glycine max
  Clone ID: 700558636H1
gcactcttcatcaagctccgctccaacacagaggaaaatgagggagatccttcacgtgcagggagggcaatgcgggaaccagatcggttccaagttctgggaagtggtgtgcgacgagcacggcatagatccgacggggaagtacgtcggaaactcagatctgcaactcgagcgcgtgaacgtctactacaatgaagcctcgtgcgggcgcttcgtgccacgcgcggtgctgatggacctggagcccggaaccatggacagcgtgcggaccgggccgtacggg

SEQ ID NO: 3842 - DNA, 284 bp, Glycine max
  unsure (1)..(284): unsure at all n locations; Clone ID: 700558637H1
ggctgtcggaaagaataagaggatttccaagggaaagaagggtggcaagaagaaagccgctgatccctttgccaagaaagactggtacgatatcaaggccccttccctcttccaggtcaagaatattggcaaaaccctcgtctctcgtacccagggnaccaagattgcatccgaangactcaaacatcgggtttttgaggtctcattggctgatctccaaggggatgaagaccactccttcaagaagattcgtttgagagctgagggacgttcnagggaagaat

SEQ ID NO: 3843 - DNA, 285 bp, Glycine max
  unsure (1)..(285): unsure at all n locations; Clone ID: 700558638H1
ggctgtcggaaagaataagaggatttccaagggaaagaagggtggcaagnagaaagccgctgatccctttgccaagaaagactggtacgatatcaaggccccttccctcttccaggtcaagaatattggcaaaaccctcgtctctcgtacccagggaaccaagattgcatccgaaggactcaaacatcgggtttttgaggtctcattggctgatctccaaggggatgaagaccactccttcaagaagattcgtttgagagctgaggacgttcaagggaagaatgt

SEQ ID NO: 3844 - DNA, 286 bp, Glycine max
  Clone ID: 700558640H1
ctctcaccctcctcttcacacattttctgtgcgctctaacaaacattctcgttcacactttcagattgtgtgaagatgggggcgggtggccgaactgatgttcctcctgccaacaggaagtcagaggttgaccctttgaagcgggtgccatttgaaaaacctccatttagtctcagccaaatcaagaaggtcattccacctcactgtttccagcgttctgttttccgctcattctcctatgttgtttacgacctcaccatagccttctgcctctattatgttgcca

SEQ ID NO: 3845 - DNA, 285 bp, Glycine max
  Clone ID: 700558641H1
ggccatgtaaacccctttatgcaactagccaaactccttcattgtgtgggtttccacataacctttgtgaacactgagttcaaccacaaccgttttgttaagtcccatggaccagactttgttaagggtctccctgatttcaaatttgagaccatacccgatggcttgccgccttcggataaggatgcaactcaggatgttccagcactgtgcgattctactaggaaaacttgttatggtccattgaaagagttggtgatgaagttgaactcttcttcccctgaa

SEQ ID NO: 3846 - DNA, 281 bp, Glycine max
  unsure (1)..(281): unsure at all n locations; Clone ID: 700558642H1
gacttgttcaaccaattggggcaagtcgtgtccgttagggtttgcagggatttgaccagccggagatcgctcggttatggttatgtcaactttagcaacccgcaagacgctgctagagcattggatgttctgaacttcactcctctcaataacaggcccatccgtattatntattcgcatcgtgatcccagtatccgtaaangtggacaagganatatatttattaagnntttggatngggcaattgaccacaaggcattgcangataccttttctacatt

SEQ ID NO: 3847 - DNA, 282 bp, Glycine max
  unsure (1)..(282): unsure at all n locations; Clone ID: 700558643H1
ccgctattctactcgcaagcaaatcagaacaagagaagagaatggcaggagcagaggggctaaacagagaacagtacgtgtaccttgcganctgttcggagcaggcggagggtacgaagagatggtggagttcatgcagaaggtggtggtggggtggacgccggcgtcggagctcacggtggaggagcgcaacctcctctcggtggcctacaagaacgtgatcgggtctctgcgtgccgcgtggcgcatcgtgtcctccatcgaacagaaggaggaagggcg

SEQ ID NO: 3848 - DNA, 281 bp, Glycine max
  Clone ID: 700558644H1
ggggaataagatcaacagtgtaggatggtggtttaaaccctggttctatcagcatgcacagacggcactgaagaaaggagagtttgtagaatacattcctaccagagaatattatcacaggcacacgagatgcttgtactgggagggaaagcttatcctcccatttgctgatcaattttggtttaggtatctgtttggctggttgatgccacccaaggtttctctcctcaaggcaactcaaggtgatgctataagaaactattaccatgaaatgcatgtca

SEQ ID NO: 3849 - DNA, 282 bp, Glycine max
  unsure (1)..(282): unsure at all n locations; Clone ID: 700558646H1
cttcacctttcttatattcaggaaagtaagatcatctgcatcgccgacgnttccaacaataacaatggccgataatgcaacaacgcaaggnagcaacaccctattttctccttacaagatggccaaattcaacctctctcatagggtggtgttggctcctatgacaagatgcagagcgttgaactggattccacaggcagcgcttgctgaatactacgctcaaagatcaacaccaggtggatttctcatcagcgaaggcaccttgatctcccccactgctcc

SEQ ID NO: 3850 - DNA, 280 bp, Glycine max; identical to SEQ ID NO: 2547
  Clone ID: 700558647H1

SEQ ID NO: 3851 - DNA, 284 bp, Glycine max
  unsure (1)..(284): unsure at all n locations; Clone ID: 700558648H1
gtccgtntggtggctggcaacatggctactggacaactttacagtcatctaatacccctcacactacttcttgttgatggtagcagtccaattgatgttaccgattcacagtgggagctgtatattgtgtgtcagaagaaaactgatcagcagggagagatccaatataggttgactggttttactgctgtttatcgattttatcactatcctgatggattcccgaatgcnactaagccagatactggtattacctccttaccagcacaagggttatggtcgat

SEQ ID NO: 3852 - DNA, 96 bp, Glycine max
  unsure (1)..(96): unsure at all n locations; Clone ID: 700558649H1
ctcangggcttactcccatgantggactgagtgtccattcgntcatccaggggagaatgcgaggaggagagacccacggnnatacccttacagctt

SEQ ID NO: 3853 - DNA, 271 bp, Glycine max
  unsure (1)..(271): unsure at all n locations; Clone ID: 700558651H1
gataactagaaacagtgtgatgaaaatgaaggtccttgttttcttcgttgctacaattttggtagcatggcaatgccatgcgtacgatatgttccctctccgaatgaacactggctatggtgcccgtactccggaggtcaaatgcgcaagttggaggcttgctgtggaagcacacaacatctttggctttgagaccattcctgaagagtgcgttgaagcaacanaggaatacatccatggcgaacaatatagatcagactccaaaacagtt

SEQ ID NO: 3854 - DNA, 282 bp, Glycine max
  unsure (1)..(282): unsure at all n locations; Clone ID: 700558652H1
agctcatagaacaaccacctttcttccactcctgctactcttnccccttccttcgtcctccaagactcactctactctcgacctcgacctcttgccacttcccagccacttcgacgctttcgcagatctggtgcacgcgccgtcgttcgcttaccggcgcgtggagaggcatctcgagaatgagttgcgtttgcagagcctctctgaccgtgtggcggantggagtcgcggttcgaccgtgtgctcggcggagatcggaagtacacgtggacagcggagatc

SEQ ID NO: 3855 - DNA, 282 bp, Glycine max
  Clone ID: 700558653H1
cgttgccattctcatcctcttctttctctctctaccattgccatgggatccctacaagcaccggccatccagcgccttcaattctcccttctggactacaaattctggtgctcctatttggaacaacaactcctctttaaccgttggagctagaggtccaattctgctggaggattatcatcttgtggagaagcttgcaaattttgatagggaacgtatcccagaacgtgttgtccatgccaggggcgctagtgcaaagggtttctttgaggtcacccatga

SEQ ID NO: 3856 - DNA, 283 bp, Glycine max
  unsure (1)..(283): unsure at all n locations; Clone ID: 700558654H1
ctatactctatttttcgcgtcacataaacaaaaaaaatanactgggtcaaagcatgttgttgatgttgggactatgcttcctattgttctctgcatttccacttgcgttctctgagagatgccacccacaagacaagaaagcgttgctccaactccagaaggacctcggcaacccttatcacatcatatcctggaacgcaaaggaggattgctggcgagtggttctgctgcgttaagtgtgacgagaaaacaaaccgcgtcattagcgttgccttatcatccc

SEQ ID NO: 3857 - DNA, 282 bp, Glycine max
  Clone ID: 700558655H1
ctgctcttgacaagtacgacttcgattctgaagttggcggcaagattaaaggcactgtgttctacacagataacaatggagcagttgttgatatcactgcaaagtcttcggcatatttgccactgcaagaggcgtgcatccacagggttaagcatgttgaagaagcaggcttagttcctgggttcaaagaggagtttttgatcattggtgagaactcaatagatgatagcttggtcttgagtttaaggtctcttcagtttgaccttgcagggaacgttgtag

SEQ ID NO: 3858 - DNA, 284 bp, Glycine max
  Clone ID: 700558656H1
gttcaatttgcacaggcctagtgcggttggcgaggaggaaacagagaaaaagaaggacaagttctcaagcaagattcacctccgagtgtgtcttgaggccgggtaccacgtccttgatgagtccacgcatttcagcagtgatcttcagccatcctccaaacatttgaggaagaaaaacattggaattctcgaacttgggatactgagtgcccgcaacttgctgcccatgaaggccagggaagggaggactaccgatgcctactgcgtggccaagtatggcaaca

SEQ ID NO: 3859 - DNA, 282 bp, Glycine max
  unsure (1)..(282): unsure at all n locations; Clone ID: 700558657H1
gctcaatgtgactaactgactatacacgacccattcaatttagttcactcactcattcggtggaagcacttattttccctttcgngtattaagcatgtaagtctcctcaatctgtttaccagctaaggttccagttcgcgtgaagtcactgcacacgaanccagnaaccgtnaacgancccacttncacggncaaggtggntgctcctaagtgggcccagaagacaataactttgcctccccttanacgtggttgtnatttaatcacttctaagatagtgaa

SEQ ID NO: 3860 - DNA, 279 bp, Glycine max
  unsure (1)..(279): unsure at all n locations; Clone ID: 700558658H1
cactgtgtaatgctatctacgatggctctctctgcgcatatttgccgtttccccgccacgcgcgctgacactgctttgccggagactctcaccagaatccggtgccagaagcctctctctgtccgatgctctggcgattccccttccggctctgtgggttcggagttcgatccgaangtgtttcgtaagaaccttactcggagtaagaattataaccgcaaaggatttgggtacaaggaagagaccctccaactcatgaatcgcgagtacaccagtgat

SEQ ID NO: 3861 - DNA, 278 bp, Glycine max
  unsure (1)..(278): unsure at all n locations; Clone ID: 700558660H1
gcggattggagcgattcttgaatttactgtgagangtgttctcagctggtcgatgttttgatactctggttctgtcttgagccaggtttatgtggtcatgctcccctgtaatgaataggaaatctccctgaaatgcaaaattctttatcctactgctcttagtcttcttngtncacatatatatgcatgaacatttatactagcatgcagattaggatcgatgcagatccatnttcggaggtgaaattcacttcaagacaactcaggttcagcgtggc

SEQ ID NO: 3862 - DNA, 278 bp, Glycine max
  unsure (1)..(278): unsure at all n locations; Clone ID: 700558661H1
gntttctggtgttggtgttgacggcattgggaagaagcttgtgaactcaaaagatggacctccaacctttgagcagcccaanatgactctggagaagctcttgacgtatggtaacatgcttgtccaagaacaagagaatgtcaagagagtccaattggctgacaagtacttgaacgaggctgcacttggaaatgctaacgaggntgctattagtaggggttctttnttccantctnnnnttgnaggcanagcaaacttggcaagtaaatatttctgtt

SEQ ID NO: 3863 - DNA, 281 bp, Glycine max
  Clone ID: 700558662H1
tgtgattgtgggaaaagatgcctcagaggcactcgaagaacaacaacgatctcgcgttcttcacgtacgacgagaagcggaaactaggttatggtacccagaaggagaggttgggaaaggactccattaagcccttcgatgcttgctctctctgcctcaaatccctaatcgaccctatgagctgccagaagggccatctcttttgcaaagagtgcattctccagtgcctcttgtctcagaagaaagacattcaaaggaagcttgcagcccatgctgctcag

SEQ ID NO: 3864 - DNA, 281 bp, Glycine max
  Clone ID: 700558663H1
gtccatgctgctgcagtacgaatccaaaacaaattccgcagttggaagggaagaagagaatttttaatgattcgacaacgcatagtaaaaattcaggctcacgtgagaggtcaccaggtcaggaaaagctgtgggaagataatttggtccgttggaatcttggagaaggttattttacgttggcgtcgaaaaggtagtggtttgcgtggatttaaaccggaggccaattctgagggaactatgatacaagatgtatctcaacagatgatgactatgatgtc

SEQ ID NO: 3865 - DNA, 283 bp, Glycine max
  unsure (1)..(283): unsure at all n locations; Clone ID: 700558664H1
cgcggtcaggttctcttgagtgaaaaggcagtagctaaccctgcagatatggaaaacttattgtctaagtgtgctgcacaactcttggatctcctaaaccgtgttgaagatgctgatattgaagacattgtcgaagtgctctgcaattttcccacagttgaagttgaagatacggggaaacttgagtcaaggaaggtagttgctgctagtatgctaggaaagagcttacaagctggggatgttgttttcgagagggtgtttaatgctgnctattcagctttgc

SEQ ID NO: 3866 - DNA, 279 bp, Glycine max
  unsure (1)..(279): unsure at all n locations; Clone ID: 700558666H1
aggactcaccgatgcatcaaagatagccattttgaatgcaaactacatggcaaaacgattggagaattattacccggttcttttccgtggagtcaatggaacagttgctcatgaattcatcattgacttganaggctttangaatactgctggaattgagcctgaagatgttgcaaagcgcctcatggactacggttttcatgcaccaacaatgtcatggcctgtgcctggcacactcatgattgagcctactgagagtgaaagcaaggccgagttaga

SEQ ID NO: 3867 - DNA, 280 bp, Glycine max
  unsure (1)..(280): unsure at all n locations; Clone ID: 700558667H1
aagaaacagtcagaatcagaatcagaagaagcgagcaaagatgtcgggtcgtggaaagggaggcaagggtttgggtaagggaggagccaagaggcacaggaaggtgctccgcgataacatccagggaatcacaaaacccgccattcgccgtttggctcgcagagggcggcgtcaagagaatcagtggcctcatctatgaaganacccgcggcgtccttaagatcttcctcgagaacgttattcgcgacgctgttacctacaccgagcatgctaggaggaa

SEQ ID NO: 3868 - DNA, 279 bp, Glycine max
  unsure (1)..(279): unsure at all n locations; Clone ID: 700558668H1
gcagaagaacaagtagttgagaactangangganaagcaaatggcttcctcaatgatctcttccccagctgttaccactgtcaaccgtgccggtgccggcatggttgctccattcactggcctcaagtccatggctggcttccccaccagaaagaccaacaatgacattacctccattgctagcaacggtggaagagtgcaatgcatgcaggtgtggccaccanttggcaagaagaagtttnngactctttcctacctgccagaccttgatgatgcaca

SEQ ID NO: 3869 - DNA, 279 bp, Glycine max
  unsure (1)..(279): unsure at all n locations; Clone ID: 700558669H1
gcaattgaagttgaagtcttgcccttctctcttcaactccaaacacaagacatcatcatccatggctgnctccgtctccactgtcngagctgtcaacagagctcttttgaacctgaatgggtctggacctggggtttcagctcncagttcatcctnctttgggancagcttgaagaaggttattggctcaagggtccccaacacaaagatttcctctggaagcttcaagattgttgctgtagaaganaagaaagagnttnangagacccagcagaccgt

SEQ ID NO: 3870 - DNA, 261 bp, Glycine max
  unsure (1)..(261): unsure at all n locations; Clone ID: 700558670H1
ggagagggctatctgaaaatcgcnncgataagaaagtttaangatggaagcgggaactgctctcagtctccgactccacactngcattcccattcccatcaacactgccaattcaaataccttattattccaacctcgcttcactctttcttctcattctccttcttccttttccgcttacagttacagaggccccacaccaaaacgccccttcctcgccgactgggtctcccaaaacgacgacctcgttcgcaccctccc

SEQ ID NO: 3871 - DNA, 280 bp, Glycine max
  unsure (1)..(280): unsure at all n locations; Clone ID: 700558671H1
ctttgaattacagagcaaagtgaagcgtgaacatggtgatgcatctaaacgggacaccgtgcgctctcggattccacatgcctgcggantgggaaacccacgcgcagtgctggatgggttggcctgaacgtgccgataactggcgtgacggcgccgttcacgcccaacgcgtgtttgcnagggtagcgtcagcaatctcaagattcgagtctgtaacagtttgtgttagttctgcacagtggganaacgcgcggagtcagctaccggagcatatcaggtt

SEQ ID NO: 3872 - DNA, 281 bp, Glycine max
  unsure (1)..(281): unsure at all n locations; Clone ID: 700558673H1
gagagaggatatgggttcgaagaggtatgcgctattgatgtgcggtgaggattcggagtacttggtgaagatgcacggaggcacctatggggtattcatgaagttgctccaagagcaagaggaaaagtgggacctctacaagctcgtccaaggagagttcccggagcagcatgacttgcctctctacgatggctttgtcatcagtggaagctgctatgatgcacatgccaatgacccatggatccttgacctcattnnntctcgttatcaaattggactcc

SEQ ID NO: 3873 - DNA, 278 bp, Glycine max
  unsure (1)..(278): unsure at all n locations; Clone ID: 700558674H1
ccttaccatgcattactatcaccatctaactgggataagttggctgaggaacttaaaaggcagttctgcaatcttttgggacagtcgtataatagtccattgagcgtgactgtagcancaggggtccaggttttgccaccactcctcaaatttatgaatgtcatggcagggaagaagaatgaatggcagtctatgaaccagttaccggtgccggttgagttggaccgtgagttccagttccattctatttntgtttgtcctgtctccaaggaacaagc

SEQ ID NO: 3874 - DNA, 278 bp, Glycine max
  unsure (1)..(278): unsure at all n locations; Clone ID: 700558675H1
ggcncnaggcgnagagaatggctcccaagggtttaatcnttttggctgtgttangcttctcagcactgtcactgagtcgttgtcttgcngaggataatggncttgttatgaacttctacaaggaatcatgccctcaggctgaagacatcatcanagaacaagtcnagcttctctacaagcgncannngaacactgctttctcctggctcagaaacatctgtccatgactgtgctgttcagagttnngatgcntcactgtngctggactccacaaggag

SEQ ID NO: 3875 - DNA, 275 bp, Glycine max
  unsure (1)..(275): unsure at all n locations; Clone ID: 700558677H1
tgtttctacagatgancccactcctattgttgtagtaattcctggtctaactagtgactcttcatctgcctatctcaaacatcttgcatatcatacagcaaaatgtggatggaaagttgttgtcagtaatcaccgaggacttggaggtgtttcaatcacgtctgattgtttctacaatgctggatggactgaggatgtccgcacagtggttaattatctacacaaagagaaccccagggcacctttgtttgttgttgggactagcattggagcta

SEQ ID NO: 3876 - DNA, 278 bp, Glycine max
  unsure (1)..(278): unsure at all n locations; Clone ID: 700558678H1
cgcatcgcaccttcaacttannctattccacttntaatcgnanatancnntgctagaagaagagacaaagtgtgtctntgtgtntgagananagagcaatggctggctcntgggcacgccgttctctgattgttctagncancanttcctgcggatgtctatntgcgatnnccattgctanggangaagccancaagttatggacggtcatcggcattgatcttggaacaacctattcatgtgtcggngtttacaagnatngncnnnnttgaaatcat

SEQ ID NO: 3877 - DNA, 184 bp, Glycine max
  unsure (1)..(184): unsure at all n locations; Clone ID: 700558679H1
atttcttcctttccctctctgcaaacacaattctccgnttcagttcanaatttcgatacgcaaagcaaatgatcccacaacaagaacccgatttcaatctcaatcacctcaaattatattacggaaagctgtttccgtntgctgntttnnttagatgggtgtcgtatgncaacgatgganagca

SEQ ID NO: 3878 - DNA, 280 bp, Glycine max
  unsure (1)..(280): unsure at all n locations; Clone ID: 700558680H1
aggaagtcctcgccgttattgtttcagcaaacatgcgcattcaaattcaaattcacattcaaattcaaatccccttctcttgaaattgcttcaggttccgaactcgcacattaaaacgacgctggatcaggaaatggcttcccttcaaagctcgcaacgttcttgggacttcctattacctctctctccccttcttcctccgacaaagctcgattgatcttngaaggattttgganaanatgctnaaaganaatgagaaagatcgagatctcttctctgc

SEQ ID NO: 3879 - DNA, 94 bp, Glycine max
  unsure (1)..(94): unsure at all n locations; Clone ID: 700558681H1
ggtggcaactggaaatgcaatgggaccactggaggaggtgaagaagattgttactaacnttaaatgaaagctaaagttccctgnagaagatgtt

SEQ ID NO: 3880 - DNA, 278 bp, Glycine max
  unsure (1)..(278): unsure at all n locations; Clone ID: 700558682H1
aaacaacgcgccactcttctctcctcacattcgtggctcagacatcggattgggccannnnnnnnnnnnnnnnnnnnacctcgtgggagaaccaaggcgacaccgcgtggggaactgaagaaggtggccacgaagaagggggtttcgctgaaaaagctgaggaagataagatcttcgttgggaacttgcctttcgacatcgacagcgagaatttggcgtcgctcttcgggcaggctggcaccgttgaggttgctgaggttatttataatagggccact

SEQ ID NO: 3881 - DNA, 227 bp, Glycine max
  unsure (1)..(227): unsure at all n locations; Clone ID: 700558684H1
ggccaagccagtgtccattgangtatggancccaagtggcaaatacagagttgtcagcaccaaaccaatgcctggaactcgntngatcnatcttctcattcanaatgatgttcgccntgaaatatgtaccgagaagaanacgnttntgncagttgaanacatcattgctntgattggtgataagtgcgatggagttattggacagttgactgangactggggagant

SEQ ID NO: 3882 - DNA, 277 bp, Glycine max
  unsure (1)..(277): unsure at all n locations; Clone ID: 700558685H1
gagagagagaggatatgggttcgaagaggtatgcgctattgatgtgcggtgaggattcggagtacttggtgaagatgcacggaggcacctanggggtattcatgaagttgctccaagagcaagaggaaaagtggganctctacaanctcgtccaaggagagttcccggngcagcatgacttgcctctgctacgatggctttgtcatcagtggaagcngctatgatgcacatgcnaatganncatggatcctganctcattgctctcgttatcaaatt

SEQ ID NO: 3883 - DNA, 277 bp, Glycine max
  unsure (1)..(277): unsure at all n locations; Clone ID: 700558686H1
gggcagctgcaacatctggtgctgtgttaaatgggttnggatnttccttcttgagtggaggaaacangagccaaacccatctggccactgctattnagaggcnaagttggtgctgctgctnttnatgttagtcctagangactcattgtggtagctgctgctgcaccaaagaagtcatggctccctggtgtcagangnggtggnaacctcgtngacccagaatggcttganggatcgctaccaggtgactatggctttgacccactaggncttngga

SEQ ID NO: 3884 - DNA, 277 bp, Glycine max
  unsure (1)..(277): unsure at all n locations; Clone ID: 700558689H1
cacagaattagggtcacgagggtttcatcctgcggcatcagacatgggaggaggcaatgggcaaaaggcaaagatggctcgcgagaagaacatcgagaagcagaaggccgcctcaaagggaagccagctggattcaaacaagaaagcaatgtcgatccagtgcaaggtgtgcatgcaaacatttatgtgcaccacatcggaagtgaagtgtagggagcatgctgaagccaaacaccctaaatctgatgtntatgcttgttttcctcatctcaaaaag

SEQ ID NO: 3885 - DNA, 277 bp, Glycine max
  unsure (1)..(277): unsure at all n locations; Clone ID: 700558690H1
ccagaactagatctagggtttattttccttttcattttgaatttgaacaagttttgcgtcttcaaagaaataggatgggaganttgaaagacactgaggcttacgaggaagagctcatcgactacgaagaggaagaagaaaaagctcccgattctgctaaacccgttgctgaatctggcaagaagggttatgttggcatccatagttcgggatttcgagacttcctgttgaaaccagagcttcttcgagccattgtggattcaggatttgagcatcc

SEQ ID NO: 3886 - DNA, 275 bp, Glycine max
  unsure (1)..(275): unsure at all n locations; Clone ID: 700558691H1
tgaacttatcgcttcttcccggtttgaatttgggtgtttccgtttcaatggatgacggcgagcttgatttctccaaccatgaagtgttttcgagtcccaacatgggtgagcttcccagcagcggttcaatggacagtttcttcgacgagcttctcaaggacacgcacgcctgcacccacacccacacctgtaaccctcccggccccgatttctcccacactcacacgtgctnccatgtccacaccaaaatcgtccccgcccctgaggaggaccat

SEQ ID NO: 3887 - DNA, 274 bp, Glycine max
  unsure (1)..(274): unsure at all n locations; Clone ID: 700558692H1
aaacagagcagagcgaccttgaagagctatggctgtcggaaagaataagaggatttccaagggaaagaagggtggcaagaagaaanccgctgatccctttgccaagaaagactggtacgatatcaaggccccttccctcttccaggtcaagaatattggcaaaaccctcgtctctcgtacccagggaaccaagattgcatccgaaggactcaaacatcgggtttttgaggtctcattggctgatctccaaggggatgaagaccactccttcaag

SEQ ID NO: 3888 - DNA, 273 bp, Glycine max
  unsure (1)..(273): unsure at all n locations; Clone ID: 700558693H1
ccttaccatgcattactatcaccatctaactgggataagttggctgaggaacttaaaaggcagttctgcaatcttttgggacagtcgtataatagtccattgagcgtgactgtagcagcaggggtccaggttttgccaccactcctcaaatttatgaatgtcatggcagggaagaagaatgaatggcagtctatgaaccagttaccggtgccggttgagttggaccgtgagttncagttccattctatttttgtttgtcctgtctccaaggaa

SEQ ID NO: 3889 - DNA, 275 bp, Glycine max
  unsure (1)..(275): unsure at all n locations; Clone ID: 700558694H1
gcattgcaagcgctctctttctttgcttttccttccccctttcagtttcttcaacgctgcaactatccatggcaaaccgctggctcagacccgnggtgtatccactgttcgctgcggttggtgccgctgttgggatctgtggattccanttggttcgtaatatctgcatcaaccctgaagtcagggtgaacaaggagggaagaaaggcaggagtgttggagaactttgctgagggagagcagtatgctgagcatntcctgaggaagtatgtgcgc

SEQ ID NO: 3890 - DNA, 274 bp, Glycine max
  unsure (1)..(274): unsure at all n locations; Clone ID: 700558695H1
tttccataaccttagtcatcttcttctttcatctttctccctaacggtatcgangganaaatatggcggaagaacacagatgccangcaccgngcttctgcgccaacaattgcggtttctttggcagccctgccacgcagaatatgtgctccaagtgctancgcnatttccagctcaaggagcagcaatcttccaacgccaagatggttctcaatcagtngctggttccttcaccgccacgggtgatttctcanncgtcgtcttcttcttcggc

SEQ ID NO: 3891 - DNA, 304 bp, Glycine max
  unsure (1)..(304): unsure at all n locations; Clone ID: 700558701H1
anaattattttcacgggaattggccatttgaatggcacagttattgtctccagtgtacacagagcctctcaaatacgantttaagttccatnagctcatggaggntactaccaaagactgcaactccttcgaactttgtaacacacaatggcaaacgaagagggtgtggcagggtaagagttgctgctgaggaaaaatcattttctacgagtgacactgttacagatgactactatgcagttttgggtctgcttccagatgccatccagcgcaggatcaagaaggcctactacaatgcatgana

SEQ ID NO: 3892 - DNA, 309 bp, Glycine max
  unsure (1)..(309): unsure at all n locations; Clone ID: 700558704H1
gacttgttgttacagaaatgccaagaggtggagcaaacagctagagaacaagccacttgataatngctatcttagatcaggtttcctaagattgtacaagttgatatacctcaatccttgtttgaggaacaaggaaggcagctttatggagccaacctattagaaatacaggcaaaaatgaaactaaatgagcagcagctggcgactctgtcaagttcaaaggctgtgaacgaatttcttgagcatcagaaggaaaatataacaaatttgataaaacagagtctgggcagttggtgatatatataggct

SEQ ID NO: 3893 - DNA, 301 bp, Glycine max
  Clone ID: 700558711H1
ctgaagatgagctaaaattgatgctaagaggtgcagaattaagtggggcaatagaggaggaagaacaggatatgattgaaaatgtgttagagataaaagacacacatgtcagagaggttatgacacctcttgttgatgttgttgcaattgatgcaagttcaagcctggtagactttcatcacttgtgggtcacacatcagtactcaagggtacctgtttttgagcaacgtgttgataatataatgggtatagcatatgcaatggatctgctggattatgttcaaaagggtgagttgctaga

SEQ ID NO: 3894 - DNA, 300 bp, Glycine max
  unsure (1)..(300): unsure at all n locations; Clone ID: 700558712H1
tncactcttcatcaagctccgctccaacacaggggaaaatgagggagntccttcacgtgcagggagggcaatgcggnaaccagatcggttccaagttctgggaagtggtgtgcgacgagcacggcatagatccgacggggaagtacgtcggnaactcagatctgcaactcnagcgcgtgaacgtctactacaatgaagcctcgtgcgggcgcttcgtgccacgcgcggtgctgatggacctggagcccggaaccatggacagcgtgcggaccgggccgtacgggcagatcttccgccccg

SEQ ID NO: 3895 - DNA, 302 bp, Glycine max
  unsure (1)..(302): unsure at all n locations; Clone ID: 700558714H1
cgagataactagaaacagtgtgatgaaaatgaaggtccttgttttcttcgttgctacaattttngtagcatggcaatgccatgcgtacgatatgttccctctccgaatgaacactggctatggtgcccgtactccggaggtgaaatgcgcaagttggaggcttgctgtggaagcacacaacatctttggctttgagaccattcctgaagagtgcgttgaagcaacaaaggaatacatccatggcgaacaatatagatcagactccaaaacagttaaccaacaagcttacttttatgccagag

SEQ ID NO: 3896 - DNA, 305 bp, Glycine max
  unsure (1)..(305): unsure at all n locations; Clone ID: 700558715H1
gtgtttttnngtcctggctacatcccgcccaataccggacaaggctttgcaaggatgagacgggctgtgctaganaagtatgcttctttgctcacaancctgaaganctacgccctgtgtatgcttccactgggtcggctatgccatcaccaaaatcctattcagctagtggacttgacatgacagcgntgagtccattggctcttagttccacatctttgccgatgnccaactgtttcaacccnacccatgtctcccttggcagcagcttcatntcccaagagtggaagcatgtggcagaacaa

SEQ ID NO: 3897 - DNA, 309 bp, Glycine max
  unsure (1)..(309): unsure at all n locations; Clone ID: 700558717H1
gtgagtttgttgatcgagataactagaaacagtgtgatgaaaatgaaggtccttgttttcttcgttgctacaattttggtagcatggcaatgccatgcgtacgatatgttccctctccgaatgaacactggctatggtgcccgtactccggaggtgaaatgcgcaagttggaggcttgctgtggaagcacacaacatctttggctttgagaccattcctgaagagtgcgttgaagcaacaaaggaatacatccatggcgaacaatatagatcagactccaaaacagttaancaacaagcttacttttat

SEQ ID NO: 3898 - DNA, 130 bp, Glycine max
  unsure (1)..(130): unsure at all n locations; Clone ID: 700558718H1
agaaaatgggctcatcctgagggagaatatgcaacagcaagagctgcatctgctgctggaacaatcatgactttgtcntcatgggctacttccagtgttgaagaggtggcttcaacaggacctggcattc

SEQ ID NO: 3899 - DNA, 303 bp, Glycine max
  Clone ID: 700558719H1
gcaaaaagaaagaatcccaggcgaggagaaagatggaggggaaggagcaggatgtgtcgttgggagcgaacaagttccccgagagacagccgattgggacggcggcgcagagccaagacgacggcaaggactaccaggagccggcgccggcgccgctggttgacccgacggagtttacgtcatggtcgttttacagagcagggatagcagagtttgtggccacttttctgtttctctacatcaccgtcttaaccgttatgggagtcgccggggctaatctaagtggagtaccgttgggattca

SEQ ID NO: 3900 - DNA, 301 bp, Glycine max
  Clone ID: 700558720H1
cggagaagccgtgtggttcaaggccgggtcccagatcttcagcgagggtgggctcgactacttgggcaacccaagcctgatccacgcccagagcatcctcgccatctgggccacacaagttatcctaatgggtgccgttgaaggttaccgtattgctggtggccccctcggtgaggtcactgacccaatctacccaggtggcagcttcgacccattgggccttgctgatgacccagaggcttttgctgagcttaaggtgaaggaatcaagaacggacgattggccatgttctctatgtttg

SEQ ID NO: 3901 - DNA, 302 bp, Glycine max
  Clone ID: 700558721H1
taatattcctgcaggcttgcgtgctgccgaggccacgctttccaattcacaagttaatgttgtccctgaatgtaaggctgtggttcttccgatggtgaaacacccatttgttgttggtttcttggttgctgagcttccattggtggagcaggaacagtgtcagaaatctcaaagtgatgggccagaaaacctcatgtctgttgaggaaccttattcatttcctccctttttggatttagataagaagtcaagggaaattcagaatcttcaggtcaagaatgaggcagttggtatgcataact

SEQ ID NO: 3902 - DNA, 293 bp, Glycine max
  Clone ID: 700558722H1
cgaaaaatatatttgggcaatgcaaagcctaacactggtcctctcatagtcatgaatctatcataactacttcctttccttttatcgtttcatccagaaaacatggatgccatgacactgtcactcccgctccctccggttccggtctgtacagtgcccgcgtctgcatcaacctcgtcctctgtttctctcactcactcctggtcggccacggccaggcagaggctctcctctcacagaacaagacccattttccggaattattcctctgcggttccaaaattacagtggtg

SEQ ID NO: 3903 - DNA, 302 bp, Glycine max
  Clone ID: 700558724H1
cccttctccttctctctctctttttcgcctcattccattttcatctatcaatggctccagtagcagcagcatcttcagattcaatcaagccaagagatgtttgcatcgttggtgttgcacgtacaccaatgggtggatttcttggtactctgtcatctctatctgccaccaagctaggctctatagctattgaagctgctcttaaaagggccaatgttgatccatcccttgtggaagaagtattttttgggaatgttcttagtgctaatttggggcaagctcctgcaagacaagctgctctt

SEQ ID NO: 3904 - DNA, 303 bp, Glycine max
  Clone ID: 700558725H1
gcagagccaacaacaagaagaacaaaaccaacatcaacaaccacaagaagaagaagcttgcaaattagaagaatcttcagttgaaagggaagaacacacaagaacaaagagaggaagaaacgcgaatgaagggagaattagagttgccaccagggttcagatttcaccccactgatgaagaattggtgaatcactacttgtgtaggaagtgcgcgggtcaaccaatcgcggttcccatcatcaaagaggtcgatttgtacaagtttgatccatggcagcttccagaaattggctactacggcg

SEQ ID NO: 3905 - DNA, 304 bp, Glycine max
  unsure (1)..(304): unsure at all n locations; Clone ID: 700558726H1
gggtgattatccacaacaaattattttncctgttgaacagtggcancatttcctaggttgcgaaaattagctttgcgctgttataattcagtncgaaggaccaggtatgttaccaagtctacagcgcctcagcaatcttcatagcctaaaagtaatgcgcggttgtgaacttctattagacaccaatgcgttncccatcaaatcttaccangctaaccttgaaggatctacatgcattccgtgatccccaatctttaatgaagacactagggcgacttcccaaccttcaaatcttgaaagtagt

SEQ ID NO: 3906 - DNA, 300 bp, Glycine max
  Clone ID: 700558727H1
attccaatatattccattctctctgtgtatttgcctacctctcccttcaagatgcagatcttcgtcaagaccctcaccggcaagaccatcacccttgaggtggaaagctctgacaccatcgacaacgtcaaggccaagatccaggacaaggaaggaatccccccggaccagcaacgtctcattttcgccggaaagcaacttgaggacggccgtacccttgctgactacaacattcagaaggagagtatcttcacctcgtcctccgtctccgtggtggcatgcagatcttcgttaagacat

SEQ ID NO: 3907 - DNA, 301 bp, Glycine max
  unsure (1)..(301): unsure at all n locations; Clone ID: 700558728H1
gaatctcacaatccttttcggaaaangccacacgtcttcatccttacntcgtcttttctttccatgaaacaacctnantnngtcccttcatatatcctcacacacttgtcttaccgtnatgtctgaacccacgttcccagtatcttcttatctgcgcgagtggtgactgccccatttgccttttcgaacccaaaacactttcttttcctcaaagatggatgctttatctaagaagaacgaaaattctcannaganaagagatggggttgttttgtcttgtctcaccacagattcttccagt

SEQ ID NO: 3908 - DNA, 299 bp, Glycine max
  Clone ID: 700558729H1
ttgcaaactagttttgttttgggaacatcatcacattacattagattggtggtaatggcagcgtcactacaagcagcagctactttcatgcaacccaccaagttgagcaggagcaacactttgcagcaaaagtctactcagtccatttccaaggcttttggtttggaacctgttggagctaaaaaggtcacatgctcccttcaggctgatcttaaggacttggctcacaagtgtgttgatgctaccaaaattgcaggattcgcccttgccacctctgccctcgttgtctctggggcaag

SEQ ID NO: 3909 - DNA, 303 bp, Glycine max
  unsure (1)..(303): unsure at all n locations; Clone ID: 700558730H1
cgccgccatctccgccgtccttcccgagggagcgccggaggtcgatccccgtactcaccgcctcaagaagcccgctcccgttcccgccggcgcgcctccggtcctcccnatctacgacgncatggcaccaggcncatccctcgcnccggcgccggcgccgggaaccgggaggcccgaagcaccacttcaacggcgagcgccaggtcaaggacttcatccacacactcttacattncggaggttacaacgaaatggctgatattctcgtaaacctaacgtctctggccaccgaaatgggaaggc

SEQ ID NO: 3910 - DNA, 303 bp, Glycine max
  Clone ID: 700558731H1
ggaacagctagcagagaaacaaagttacaagtaaagtaaattaagaagatcattaatggcttctcttgcaaccttagctgctgttcaaccagctgcgctcaatggccttgctggaagttccctctctggaactaagctctctttcaagccctctcgccacactgtcaaatccaagaacttcaggagtggtgccgtggtagcaaagtatggtgacaagagtgtgtactttgatttggaggatctgggcaacactacggggcggtgggacttgtatggctcagatgcaccttcaccctacaacct

SEQ ID NO: 3911 - DNA, 296 bp, Glycine max
  unsure (1)..(296): unsure at all n locations; Clone ID: 700558734H1
gcctttggaagtggagcaagccaatcagccactgagtttcctggtgtttcttncatggnctgantaaactttttactgataccttagctaaaaccatggtggaacctcgccgtcgttgtttcagtttgcctgtggttgatttgaggaaaactgctgttggaggcattntatatgtgtcagtgntttcagcnaacaanctttctaggagttgcttcnagagtagcccatctttgaggcaacgaaatgagcacgatcaatggatattcagaaaacaactggatgacaatggactacag

SEQ ID NO: 3912 - DNA, 303 bp, Glycine max
  unsure (1)..(303): unsure at all n locations; Clone ID: 700558736H1
cttccaacacttattcctttttttttttccctcttgtcattactnaaattggaaacattatttgangctatcaaacaacaatnctttcttctatcaaccctcagccatggtgttttctttcaaccaaagcttctgcctttcttcttcgcttctccttctcctcatggccctctgtgtttcttctctttctganaccgttttcaactctcaagcagcgcataccgctcggaaccttnttcaggctaaaaaaagttgtncngtgaatttcgngtttttaaactacacagtaatcacaagcaaatg

SEQ ID NO: 3913 - DNA, 293 bp, Glycine max
  unsure (1)..(293): unsure at all n locations; Clone ID: 700558737H1
cgccgcacaagtgggtctccccgttgggatcgangncttcaacgtcgatacgcctncgggaaatgacccccagaatctacatgggcctatcccttctccaacaagncttcgaaaaactcttccatgacttgcaaccggattncatcgtcaccgacatgttccanccttggagtgtcgntgctgctgctaaactcggcattccgaggatcatgttccacggcgcaagttatctcgctcgctccgntgcgcactccgttgaacagtacgcaccccacttggaagcagaattcgat

SEQ ID NO: 3914 - DNA, 299 bp, Glycine max
  Clone ID: 700558738H1
ccaaagtctgtctatgtcgggggtgattttcgtcgtcatggtgaagggggtacacatgttgctattgcttttgaagtgcctggtggctggcaaaaggagaaagatgctattgttttgactgttttacagatgcttatgggaggaggtgggtcattctcagcaggggggcctggaaaagggatgcactcaaggctatatcttaatgtgctgaatgaatatcagcagattcaatctttttctgcattcaacagtatcttcaataatacaggactgtttggcatttatgcaagcactagccc

SEQ ID NO: 3915 - DNA, 298 bp, Glycine max
  unsure (1)..(298): unsure at all n locations; Clone ID: 700558739H1
gcaggactcacaacccccaaacaaagggaagnngccactgcttcaagtggccttggtggtggagcctttttgcttctcaggttgaataatggggtggcaaaggcttttgatatgaganaaactnctcctgctcttgcctccaaggatatgtatgctggaaatactactttganggccaaaggtggcctatctgtagcagttcctggagaacttgctggccttcatgaggcgtggaaacaacatgggaagcttccatggnaaagacttgtaaagccagctgagattctagcacgtagag

SEQ ID NO: 3916 - DNA, 299 bp, Glycine max
  Clone ID: 700558740H1
ctttcttcctttgtaatagaaagcacgcgtttctctctctccctctctcaacgaatatttgtgtacttcctcttttgtgggtagattcaatttaccatgtcgagttcatcggaatactctcaattttccggccagaaaccggcgaggtcgccggagaaatcgagcttctctcagacttgtagcctgttgagtcaatacatcaaggagaagggtagcttcggagatcttaccctcggaatgacatcatgtgggtcacctgagacatcttgtcaatctgctacaaccatgaacttgtttcc

SEQ ID NO: 3917 - DNA, 300 bp, Glycine max
  unsure (1)..(300): unsure at all n locations; Clone ID: 700558741H1
cttcatttggcaaaagcgaatgatggagagggtccagatatattacgcagtgcacaggaaggtgattcaagtggccatgctgagtctttagcancaacccttgcagagcatcagcagcatttggctagcttccaggtgcttattaaccaactcaaggatgttgctccaaccatacagaagtccatatctgagtgtacagaaaaggttaactgtataacctccaatttacctccaacgaacagacctaatggtcggtcaacgtcacctatccagacacagagtagtgggaggatggacaat

SEQ ID NO: 3918 - DNA, 299 bp, Glycine max
  unsure (1)..(299): unsure at all n locations; Clone ID: 700558742H1
ggataaaaaaacatatgcgggtatgcactcatggtttgcactgaatccagtcacccctgccatagttgaaataaaaagcattcaccaatttgactggttgactagagagaatgtcccagtgcttgaagccgtagaaaatcaaaatgggattaggaattactaccatgggaatcatattgcagganccaatctcagtgacaccagtccacgtaaatttgcatctaaattgcaggccagaagtccaaaatacatatctttactcaaccatctccgcatatacttaccagagcttttcccaa

SEQ ID NO: 3919 - DNA, 234 bp, Glycine max
  Clone ID: 700558743H1
caaaagaataccatatccacaagatatatgttattcttttggggtgagaaactgtttccgtactgactacaagcttgcagcattaaaagtagctatagggatttcgatgctatgcctctgcagctatatcacccttccattatatgctcttgtaactcagatgggttcaaggatgaaaacagcagtatttgaagagcaaacaaacaaggctctgaagaaatggcacatggatgc

SEQ ID NO: 3920 - DNA, 297 bp, Glycine max
  Clone ID: 700558744H1
gcaacctatggtgatcaaactagtaccataacaaaacaacagttggagattaacttgggtggggtcacagtagaagaggcaattagtgctcacagattattcatattagattaccatgatgcattcttcccgtatttgacgaagataaacagcctacctattgcaaaagcttatgccacaaggacaatcctgttcttgaaagacgatggatctttaaagccacttgctatcgaattaagcaagcctgcaacagtgagtaaagtggtgttgcctgcaacagaaggtgttgagagtaca

SEQ ID NO: 3921 - DNA, 298 bp, Glycine max
  Clone ID: 700558745H1
gcgacccatacatccttcacaccaacgtgtttagccaaggcaagggaaatagggagcaacaattctacctctggtttgacccaactgcagattttcacacctattccatcctatggaaccctcaacgtattgtcttctcagtggatggaagtccaattagggagttcaagaacatggagtcaaagggtgttccattccccaagaaccaggcaatgaggatatactcaagcctgtggaatgcagatgattgggccacaaggggaggtcttgttaagacagattggacacaggctccttt

SEQ ID NO: 3922 - DNA, 297 bp, Glycine max
  Clone ID: 700558746H1
cgagcccccgtcctacctcactggcgagttcccaggtgactacggctgggacactgctgggctttcggccgacccagaaaccttcgccagaaaccgtgagctcgaagtgatccactccaggtgggccatgctcggggccttgggctgcgtcttccccgaactgttgtcccgcaacggggtcaagtttggagaagctgtgtggttcaaggccgggtcccagatcttcagcgagggtgggctggactacttgggcaacccaagccttgtccacgcccagagcatcctcgccatctgggc

SEQ ID NO: 3923 - DNA, 301 bp, Glycine max
  Clone ID: 700558747H1
ggaacagctagcagagaaacaaagttacaagtaaagtaaattaagaagatcattaatggcttctcttgcaaccttagctgctgttcaaccagctgcgctcaatggccttgctggaagttccctctctggaactaagctctctttcaagccctctcgccacactgtcaaatccaagaacttcaggagtggtgccgtggtagcaaagtatggtgacaagagtgtgtactttgatttggaggatctgggcaacactacggggcagtgggacttgtatggctcagatgcaccttcaccctacaac

SEQ ID NO: 3924 - DNA, 304 bp, Glycine max
  unsure (1)..(304): unsure at all n locations; Clone ID: 700558748H1
tgctttggaagtgttactggctgcatggaaatcaaggtcatctagtggaaagtatattcttccatggatatacagcatattagtgaatcatgatctcaatcacattcctcggcaatatgtgacatgtacactcaattccttagacaagattaccaattttagaggggcaactcatcagcctttgttacaattatcaggtcgtctgcaactcctgacatcacagattgagaaggcttctccaganataagccatccggtgcatgaactccaaatgcaaganagtgaagatgaagatgagggtgng

SEQ ID NO: 3925 - DNA, 304 bp, Glycine max
  unsure (1)..(304): unsure at all n locations; Clone ID: 700558749H1
tgaggtgatggctttgantttgccttctcccgcccaagtgaagcccttatttttctcttcaaataactccacaaaacttccaggtagcttttctttgaagagaaaagatagtgacacaacagtagagagacgagtttattgctctgccgctgctcaatcaccaccaccagcatggccaggaacagctattcccgagccttctgatttcaagacatgggatgggcaaaaacctatttctgtcttaggatctacgggttcaattggnactcagacactgagtatagtggctgagttcccagaaaga

SEQ ID NO: 3926 - DNA, 299 bp, Glycine max
  Clone ID: 700558751H1
attgctacatagggctatatagcataaacatttgagtcttcattgcacaatgtcaacctcttccataaacgggtggtgcctctccttccatctccccagccaaaacctctctcaggaaggccacattacgcccttccgtcttcgcaacccttaacactccttcttctccttcctcttcatcttccttcccctctctcattcaagacaggcctgtttttgctgcccctgcccccatcatcaccccaactgtgagagaggatatggcaaaggaatacgagaaagctattgaagaattcaga

SEQ ID NO: 3927 - DNA, 303 bp, Glycine max
  unsure (1)..(303): unsure at all n locations; Clone ID: 700558752H1
attatttccttcttcagcttagctcaaccacttccacttcaacaatnantgngngcttncatcactgcgcaancatactcgtcgccttgccccaaaccccgcaatgcngtagcaccttccgatccgatccacccaaactatccctaanncctaaaacccaaggccactgttacatgtaaggccaccctgtccactaccctggagactagcatcnnnnnnnnnnnnnnnnnagatgaccaaaaacnanagcccgtggccgaggtgtggcgcaagatccacggggaggncaatgggccgggcttc

SEQ ID NO: 3928 - DNA, 297 bp, Glycine max
  Clone ID: 700558754H1
gttcgctttagcaacaaggacattgttgcacaaataatatctgctagcattgccggcgatttagttcttgctacagcatattcacatgagctgccacgatatggtcttgaagtaggacttacaaattatgcagcagcttattgcactggtctcctgttggcccgaagagtcctcaaaacacttgaaatggatgaggagtatgaaggaaatgttgaggctactggagaggattattcagtggaacctgccgagagcaggaggccattccgtgcactccttgatgttggtcttgttagg

SEQ ID NO: 3929 - DNA, 296 bp, Glycine max
  unsure (1)..(296): unsure at all n locations; Clone ID: 700558755H1
aaataattttagtattttaaggactatttaggggagagagtaatatttgagggactaatttgatggtttactcaataatttttacacttttccatgttgttaacctggttgttttgttttatgtgtcttctttctgtttntcatagaatatagacggtgtgaactacttccacgtaaaggttgctggattgctatttgttgctactactagagtcaatgtctccccttctcttgttttggaacttttacaaagaattgcacgtgtcatcaaagattaccttggtgttctcaatgaa

SEQ ID NO: 3930 - DNA, 300 bp, Glycine max
  unsure (1)..(300): unsure at all n locations; Clone ID: 700558756H1
gnattcacaaccgacaatggcgacaaaacctcgtttggnttatctctcttccacttttccttcttcttnttgttgtaactgtcctttacttcggtgtcggcacaagccccagantccccatcactctacaacaccttccttcaatgcctcaccanatacacaantaacccctccaacatagtcttcgcnaacaccaaccccaagttccccactatcctccaaaactacatccgaaacgcgcgtttcaacacctcctcgacgcgaaanccattactcatcgtcatccccagcaagaatcac

SEQ ID NO: 3931 - DNA, 299 bp, Glycine max
  unsure (1)..(299): unsure at all n locations; Clone ID: 700558757H1
tggcatccctcactgtcccaaaccattgtgttcccaccttgcttcgcactcactctcccaaccacccatcttcccaaaacctcccatttccttccacaccatcaaattccccattttncggcctcaagttatctcattcttctgtttcatctatcccttcatcttcttcactcaaaggcaccattttcgccaaggtgaataaggntttcaaagccaccgaattttacgctgaaagatcagaatgggaagaatgtgagcctctccaacttcaaaggaaaaccagtaattgtgtatttcta

SEQ ID NO: 3932 - DNA, 245 bp, Glycine max
  Clone ID: 700558758H1
gagtgggttgggttgcgtgccccgttccgttcgttcttcccctttcctttcaattctttcttttcaattctttttcttctgaacacagaaaaaacagaagatgggaatgaaacaagtcattaaaaacctcgacgcctttcctcgcgccgaggatcacttgttgcagaaaacccaatctggggctctcgtatccgtaattggtctcattataatggccacattgttcgttcacgagctcggttatt

SEQ ID NO: 3933 - DNA, 285 bp, Glycine max
  Clone ID: 700558759H1
ctcataagataactaactcactttgtgtgatagagttctcattctcatggctattaccggcgatattttccggcagagcataacggaaatgcttgcggagtccccttccggtgcgccagaacttcacgttctcgccgtcgatgacagcctcgttgatcgcaaggtgatcgaacggttgctgaagatttcttcctgcaaagtgacggttgtggagagtggaacgcgcgctcttcagtatcttgggttggagggagagaacggttctcttgggtttgatagtgttaa

SEQ ID NO: 3934 - DNA, 285 bp, Glycine max; identical to SEQ ID NO: 3933
  Clone ID: 700558760H1

SEQ ID NO: 3935 - DNA, 298 bp, Glycine max
  Clone ID: 700558762H1
tcacttttttcagcttctctaaattctctgtctacttcaccaagcacttttggttgcagctttggttaatttccaatatggtgtttcctctcctatctatctttgctttactcaatcttgcagtggtggcaacccatgcagaaaccttgccccctgaagtttactggaagtcgaagcttcccaccactccaatgccgaaagccattacagatatccttcacccagatttggcagaagacaaaagcacctctgtggccgtaggaaaggggggcgtaaacgttaacgcagggaaaacaaa

SEQ ID NO: 3936 - DNA, 299 bp, Glycine max
  unsure (1)..(299): unsure at all n locations; Clone ID: 700558764H1
aagttagagggggaacacgaacttccacctctgagccaccttctcnntttgacggaaccaccaggttgtacatcagttatatttgtccctatgcgcaggtgtttggatcactcggaactataagggactacaagacaagatcaaactggttcctattgacctacaaaacaggcctgcttggtataaggagaaagtctaccctgaaaacaaggtgccatcattggagcacaatggaaaggtcttgggtgaaagtctcgatttggtcaaatacatagatgacaatttgaagggccgtctct

SEQ ID NO: 3937 - DNA, 302 bp, Glycine max
  unsure (1)..(302): unsure at all n locations; Clone ID: 700558765H1
aatttttctctcaaccggcccaatttagcataagcccagcatggccaccgcaaacagcagcagccacctcgtccttcatggggacgcgcctcctggaggcccactccggggcggggcgggtgcaggcccggttcgggtttggcaagaagaaagccgccgccccgaagaaagtttccagggggtcgggctctagctccgataggcccctgtggtatccgggcgccaaggcgcccgagtacctggatnggagcttgtcggagatacggattcgacccatttgggctagggaagcccgccgagta

SEQ ID NO: 3938 - DNA, 299 bp, Glycine max
  Clone ID: 700558766H1
cgtgagtggacccagagggtgatgttagcagggcgagttgagttcttcgaacacttaagtcggagggactgctgaagacgcaacccaaccaaccatggctgcttctgatcccaacaagttgatggccaaagctgataaacaaacaagactcagtctcacgaggtggagtgcggattggaaaagtgctactgttctatatgagcaggcagctaatgggtttagagttgccaaggactatgagaatgccaaaatagcatatgagaaagcttcgaaaggacaagagatgctttcttcacctt

SEQ ID NO: 3939 - DNA, 299 bp, Glycine max
  Clone ID: 700558767H1
tgcagccatacaagtttatcctccccccgacgtggaaacaggctcgtgtagcaaatatactatctggaaattactgccagcctaaatgtgcagagccctgggtggaggttaagtttgaagatgaaaaacaaggaaaagttcaggtagtggcttcgcccttgatacgccttaccaacaaaccaaatgcaacaattgaggacattgggagcccagaaaaactgattgcttctcttggaccatttgtcactggaaacacttttgatccagaagagctccttgagacttcagttgaaaagctt

SEQ ID NO: 3940 - DNA, 298 bp, Glycine max
  Clone ID: 700558768H1
ttcttgtcctaagcctcaacacaaacacaaactcaaacacacacactctttcttctatcttctcccaatttgagttgagattctgagagtaacaatcaaagtttggaaaaaaaaaaagttttgagggaagaaaagaccaatatgctgggtgtggccactcttactttgggttcatccaccacaatggtggctcagaaccatgctcaacaacatgccaccactcttgcctcagccaatggaaacagaaggcacagtgtttccaacaggactcactccttgcctatgagtttggtgtctc

SEQ ID NO: 3941 - DNA, 297 bp, Glycine max
  Clone ID: 700558769H1
ttcaaacctaacgcagcatcgttattctcttcattccatggctttgcccaaccagcaaaccgtggattaccctagtttcaaactcgttatcgtcggcgatggtggcacaggaaagacaacctttgtgaaaaggcatctcaccggagaattcgagaagaaatatgagccaaccatcggtgtggaggttcacccattggattttttcacaaactgtggaaagattcgattttactgctgggatactgctggacaggagaaatttggtggcctcagagatggatactatatccatggaca

SEQ ID NO: 3942 - DNA, 297 bp, Glycine max
  unsure (1)..(297): unsure at all n locations; Clone ID: 700558770H1
ggagaccntggttttgggggnnacancganaagtantacgttgntaagttgagtcaattngngttagaatttgnagcancgttgggtgctgcaaatgacnagatanttgcnattcagatnacaggnacngctacgannaaagggaaagtttcttcttctnnttcttctncaactcgtacncagnanctaggatccattcacancaccttcccccaaagantcatcaattctaaggcaccancaatcgtgtgggacgcacgtganttctgcgggtttcatctcttnctcaaacatagg

SEQ ID NO: 3943 - DNA, 303 bp, Glycine max
  unsure (1)..(303): unsure at all n locations; Clone ID: 700558773H1
gttctctgaatcttggaacatggcctcgtcccanctctatgttgaacngcaccttcacatctaccttnccccctnttcacactgctacactctcatcnacaacnncttcccaaactcgnanntngaaccccaaaactantatcttcttttcccctcgtnctctgctgtgcccactaaggaacacacagtcacagacccaggaaattcaactccaagaacacgccgctcaacttcgatttcaagggctacatgatcgccaaggcccacacggtaaaccaagccttggagccgccattgcgttga

SEQ ID NO: 3944 - DNA, 297 bp, Glycine max
  unsure (1)..(297): unsure at all n locations; Clone ID: 700558774H1
actttngaaagtgaagactctatnttgaaaaagcaacncctctnatgcancagtgnaaggagctcagcggtcatgacatatttgctccgccaccagaaatcaaacccaggccaataactcctcgcatactggagttgaaaggaagcatagacattggagaacgtcatgcngatggagatcaaggcgataccaactctgctgggaagacagcaaagaagatctatgacaagaaatttgcagaactttcagggaatgacatattcaaaggggatgcaccaccttcatctgctgacaaat

SEQ ID NO: 3945 - DNA, 294 bp, Glycine max
  Clone ID: 700558777H1
aaagaagcgaaaagcgagtgaggttagtgtgttgcgtaataaaagaaaacgaacggtggtgataggcttcagtctagatctcaatcgtctccaccttgctttcttctccagcgtccgattctctcaccgatctcgcgccaaatacaaattcgttacaaccctacccagggttccggcgagcatggccgacggtccggcgagtccaggcggcggtagccacgagagcggcgagcacagccctcgctctaacgtgcgcgagcaggacaggtacctccccatcgctaacataagccg

SEQ ID NO: 3946 - DNA, 295 bp, Glycine max
  Clone ID: 700558778H1
tctagaatggctttgaagcttgtaaatctagggtttcactcatcgattccgtgttctccgaggcccttgaaagatcggttcgtgcttcggtcttctaaagtggagcaaatatcgtttacggaatctgagaactcactcatcgaagcccttcttggcatccaaggacgcggacgttcttcttctcgtcagcagctcaatgctgttgagcgtgctgttcaagtcctggagcggttagggggtgtacctgatccgacaaaatcaaacttgatcgagggtcgctggcagctaattttca

SEQ ID NO: 3947 - DNA, 297 bp, Glycine max
  unsure (1)..(297): unsure at all n locations; Clone ID: 700558779H1
gatggaggaagagacctccgatgcaatgaaccttgatttgaatctgggcccaggcccagaacccgaaactgggcccataagcaatgaagctgtgaacttggacgattggataggggagcctcttcagagaatcagcgaagtgtgaggtatagggcacggcaacggtggagatggcgccaacttccgctaccgcctcctgaatttcatgctcactttccaactgaagctacgcggcattttcaaataccgcctgaggctcacaatatctccgtggaattgaaccactttttggtcant

SEQ ID NO: 3948 - DNA, 302 bp, Glycine max
  unsure (1)..(302): unsure at all n locations; Clone ID: 700558781H1
gncttcttggtgctggggnagnacanantggagcaatcatattcatgggngaattngactcttggcgaagngatggaggaggatgaggaggagtnncttcgcgacatcctnagtaaaccggctttttnttccgagagtgaaagtcaagcaccagttgtctcatgntctgccaanagcaaaagggctccgatgacatacnttttgtcttttggtgnctncaccataacnccagcaccttcttcngcccccacnatagaggcncaacctggnaaagagggctaanagngcttcccacatnatgg

SEQ ID NO: 3949 - DNA, 295 bp, Glycine max
  Clone ID: 700558783H1
tttgggagttaggttctgcacgctctgcttccagcgagtgttctttcttcgtttcaacaccttaatttgcacacgctgcttcttcagcttgagaaatggcacaagaaacctttctattcacatctgaatctgtaaacgagggtcaccccgacaagctgtgcgaccagatctctgatgcagtgctcgatgcgtgccttgaacaggaccctgacagcaaggttgcctgtgagacatgcaccaagaccaacatggtcatggtctttggagagatcacaaccaaggccaacgtagatat

SEQ ID NO: 3950 - DNA, 297 bp, Glycine max
  unsure (1)..(297): unsure at all n locations; Clone ID: 700558784H1
gcttagctcaaccacttccacttcnanaatcaanggcngcttcatcacncgcaaccatactcgtcgccttgccccaaacccngcantgccgtagcaccttccgatccgatccacccaaactatccctaaccctaaaacccaaggccantgttacatgtaaggccaccctgnccactaccctggagactagcatcnnnnnnnnnnnnnnnnnagatgaccaaaaacnaaagcccgtggccgaggtgtggcgcaagatccacggggaggacaatgggccgggcttctggaaccgatgga

SEQ ID NO: 3951 - DNA, 295 bp, Glycine max
  Clone ID: 700558785H1
ggaaggtcacttccgtggcctatgttgcatgctctggctacaagttgccattgatcaaagctgaggccagagttcctaaagccaaagaatctgaaggaggcaggagaggtgcccttgttctcttggcagctacccttttcacctctgcagcttccaattcttctgccaatgctgggatcattgaagattaccttgagaggagcaaggccaacaaggaattgaatgacaagaagaggttagctactactggagcaaactttgcaagagcatacaccgtggaattcggtagttgcaa

SEQ ID NO: 3952 - DNA, 295 bp, Glycine max
  Clone ID: 700558786H1
ggctgcacaagctcttgtatcatcatcatctcttaccttctcagccgaggctacaagacaaagtcttggaccaagatcactccaatctccatttggcttctcaagaaaagcctcctttcttgttaaggcagctgctactccccctgtcaagcaaggatcagacagacctttgtggtttgcatcaaagcaaagtctttcctacttggatggcagccttccgggtgactatggatttgaccctctgggactttcggaccctgaaggaacaggagggttcattgagccgaaatggcta

SEQ ID NO: 3953 - DNA, 295 bp, Glycine max
  unsure (1)..(295): unsure at all n locations; Clone ID: 700558787H1
caattgcaacggttgaattttgactgaagacaaagttagaaaaaaaaaacatgtcttgctccgtcgcggtttccaattcnccggtgttctctccttcttcttccctcttctgctcgaagccctccatcatctcttcttcgccggaatccctctccctctctctgtcgcatctcaaaccttcgaactcttctacgtcgtcgtcttgttnnnnnnnnnnnnnnnnnnnnnnnnnnnnnnnnnnntctnctccgtttcgacttcgccttcccaagcctcccaccgcgttctccgcgtc

SEQ ID NO: 3954 - DNA, 294 bp, Glycine max
  Clone ID: 700558788H1
ggagatggagttttagaacgtgcggctggtgcattggctaatttggcagctgatgacaagtgtagtacagaggttgcactagcaggaggtgtacatgctctagtgatgcttgctcgtaactgcaaatttgagggagtgcaagagcaggctgctcgggcattggctaacttagctgcccatggagatagtaacagtaacaatgctgccgttggacaagaagcaggtgcccttgaggctcttgttcaacttacttgctctccccacgagggtgtcaggcaagaggctgctggtgca

SEQ ID NO: 3955 - DNA, 293 bp, Glycine max
  unsure (1)..(293): unsure at all n locations; Clone ID: 700558789H1
tacaaaggntgctgtaggagataagattncagtagtgctaagtgctaacacctgcagtgaacantggcctctgcatcagcatctctgctcaagtcttcacttgttcttgacaagtctgagtgggtgaagggncaaacccttcgccaaccttctgcatcagttgtgagntgcaaccccaccaccccatcaggcctcaccatcagagctggttcctatgctgatgagctcgttaagaccgcgaaaacagtggcttcaccaaggaggggtattttggccatggntgagtccaatgc

SEQ ID NO: 3956 - DNA, 291 bp, Glycine max
  unsure (1)..(291): unsure at all n locations; Clone ID: 700558790H1
cctttgttcactcttcttctcttgcggctagggttttancgcagttcttctagatttaaggaagatgggtaaggaaaaggttcacatcagtattgtggtcattggccatgtcgactctgggaaatccactaccactggtcacctgatttacaagcttggaggcattgacaagcgtgttattgagaggtttgagaaggaagctgctgagatgaacaagaggtctttcaagtatgcctgggtgctggacaaacttaaggctgagcgtgaaagaggaatcaccattgatattgc

SEQ ID NO: 3957 - DNA, 293 bp, Glycine max
  unsure (1)..(293): unsure at all n locations; Clone ID: 700558791H1
cgcgtttctcgatcacacagaacaattcaattcatcagcgtgtctccacatgttcncgcgtggancctacntcgccntttncnnnnnnnnnnnnnnnnnnnnnnactgattggnttanttgcacgtaaaggagcgtntaannattcgcagcacgtgttgttattnnnnnnnnnnnnnnnnnnnnnnnngtggcggcagtngtagtatntggaaattgaggnttgagtggggtgtgtgaaaaatggctgccaggagtgatcnccanacggttcctcttncgntgctcctgaggc

SEQ ID NO: 3958 - DNA, 293 bp, Glycine max
  unsure (1)..(293): unsure at all n locations; Clone ID: 700558792H1
gttaaaagccttagccttccctacaactccaaacaggnaagacatcatcatccatggctgcctccgtctccactgtcggagctgtcaacagagctcttttgaacctgaatggttctggagctggagcttcagctcccagttcagccttctttgggaccagcttgaagaaggttattgcctcaagggtccccaacagcaaggtttccggtggaagcttcaagattgttgctgtagaagagaagaaagagattgaagagacccagcagaccgacaaggacagatggaagggtctt

SEQ ID NO: 3959 - DNA, 295 bp, Glycine max
  unsure (1)..(295): unsure at all n locations; Clone ID: 700558793H1
cttttgagcttgttatagtacagangantcacgtataattnanccaatgaatncncacancatccaaaccagacagactacactaaaggatggagtgcaagggtgacactttttaactggggtgacactaattttgcagactggtttgccgcagtacaaatggacaaagcagcttcgggttttgagaaaatgtattcattcaatgcaactcttctagatggtgtaaacaatacantaatcatgcaaggtttgccaggattganctaccttgtagcagaagcagatggagctgacc

SEQ ID NO: 3960 - DNA, 285 bp, Glycine max
  Clone ID: 700558794H1
cttacatagccatgatgggttctaaaggactcaccgatgcatcaaagatagccattttgaatgcaaactacatggcaaaacgattggagaattattacccggttcttttccgtggagtcaatggaacagttgctcatgaattcatcattgacttgagaggctttaagaatactgctggaattgagcctgaagatgttgcaaagcgcctcatggactacggttttcatgcaccaacaatgtcatggcctgtgcctggcacactcatgattgagcctatgagagtga

SEQ ID NO: 3961 - DNA, 296 bp, Glycine max
  Clone ID: 700558795H1
cgcccattgttaccacgagtgattgtgagggtgctggtgagatgtttcaggtgacaactttgctgagtgaggctgagagattggagaaggagttcttgcagaatccgcctccgtcggaggcagatgtggaggtggctaggtttgttgttcaggagaaaggggaggttgtgtctcagttgaaagctgccaaggcgagtaagcaggagatcggtgctgctgtggatcagcttaagaaggcaaaggagagttttgctaaggtggaggagaggtctaagcttaagcctgggattcccaga

SEQ ID NO: 3962 - DNA, 270 bp, Glycine max
  unsure (1)..(270): unsure at all n locations; Clone ID: 700558796H1
cctccaaattttccttcattctcacgcgccgccgtggtttccgccggcggctactccntatccaccgcgcatccatcccgcttccctctcctcgcttttctcacaaaacaaaaaaaattaaaaatttctccgaagactgtgtattatcgttatcgttcacgccgttaggttttgctgttcttcctagggttttattgtgtccaataacaagaggagggggaagagaaacaaaacaanaaaanaaaggataaagggnnaaaanttagggtt

SEQ ID NO: 3963 - DNA, 289 bp, Glycine max
  unsure (1)..(289): unsure at all n locations; Clone ID: 700558802H1
gttggggttctcacgatttcgattcaccctttctcccacacactccgattcnanctgtaaacagcggtgccagaagttgatataggatgggggcaatgatgtcgagattctggttcatgttattccctgcaaaagagtataagattgttgttgtggattggataacgctggaaaaaccactaccctttataaattgcatctgggtgaggttgtaactaccaaccctactgttggtagcaacgtcgaagagctcgtctacaagaatatacgatttgaggtctgggatctg

SEQ ID NO: 3964 - DNA, 287 bp, Glycine max
  Clone ID: 700558803H1
gatggagaagtgttcctgagtttgcctgcacttgttggtagaggaggggttctgagtgtgaccaatgtgcacttgaatgaagaggagacacagaggcttaaggactctgccaagaccatccacgaggtgcagactcaattgggtatttgaatttctgtgatggtcacgtggatatccggttactgcttttttgtccttaagttttcttttgttcttctccccatgatgatatggtttgacctaaattatagtacttgctgctgttagtgttagtccctgccccttct

SEQ ID NO: 3965 - DNA, 280 bp, Glycine max
  unsure (1)..(280): unsure at all n locations; Clone ID: 700558805H1
ctggagcttgctcacttccccacccctcctgccctnacttcatccttttngttatggctggttacgtggcaccttggcttgttcatctgcctcacttttgggcaaattggattcaagggaaggactgaagagtacttttgaattccaacttatggtatgcttntgctttctctnttttncttcattcccttttgtgccttgcaatctataatgtataactctatgctacctttttccttcttactaggagaaatctgtgtaatatcgccttcanatgttg

SEQ ID NO: 3966 - DNA, 288 bp, Glycine max
  Clone ID: 700558806H1
ctcagtgtaccaggagaatttacaacaatggctgggaggcgtcttcgtgacgctgtgaagacagtgctaagtggtagcaaaggctttggtagcaacattcatgttgttattgcggggttgactaatacttattcacagtatgtgactacatacgagagtaccaggtgcagagatatgagggtgcttccacgctgtacggtccacacacactgagtgcttacattcaggagtttacgaagcttgcgcgtgctctcatcatggccagcctgtagaaccaggtcccaaccc

SEQ ID NO: 3967 - DNA, 293 bp, Glycine max
  unsure (1)..(293): unsure at all n locations; Clone ID: 700558809H1
cgttgctatgacaattctatacaatcgtaacgtttgcttaagatgngaaaaagcaaccacttgatcggtctcttaaacttcctaacattcctgctgtcgattccgatcctaggaggcgggatatggctgagcagcagggcgaacaacaccgactgctcaagttcctgcagtggccgcnnnnnnnnnnnnnnnnnnnnnnnatggtcgtgtccctggcggggttcgccggcgcgtgttaccgcaacaccttcctcatgcggctctacctcgtcgtcatgttcctggtcattgcc

SEQ ID NO: 3968 - DNA, 291 bp, Glycine max
  unsure (1)..(291): unsure at all n locations; Clone ID: 700558810H1
tacatncccacctttagtcttgttcttagagatggcttgtgaaaccaagtcatggttggttatgtttcttgtttnnttggttgctaattgcatgcaacattgtgtccacggggtgtctcaagtgccttgcctttttatctttggggactctatgtngatagtggaaacaacaatgaacttccaaccanttcaaantctaatttcagaccatatgggatcgactttccantaggaccaactgggagatataccaatggccgaacagaaattggcatnatcactcaattcngg

SEQ ID NO: 3969 - DNA, 293 bp, Glycine max
  unsure (1)..(293): unsure at all n locations; Clone ID: 700558812H1
gcccagaacaacaaaaattgcnccctcaacgccctaagtcgtcgtttcggttcggtgagatgctcctacgcttacgtagataacgccaaaattaaggttgtcggcatcggcggtggcggcaacaatgccgttaatcgcatgatcggaagtggtttgcaggtgtagacttctatgcgataaataccgatgctcaggcactattaaattctgctgctgagaaccctattaaaattggagaagttctgactcgtggattaggtacaggtgggaatccacttttgggggacaagctg

SEQ ID NO: 3970 - DNA, 292 bp, Glycine max
  Clone ID: 700558813H1
caaagattttgctcaaaaatgtgtcgacgccaccaaaattgcaggattcgcccttgccacctcagctctacgttgtttctggagcgagtgcagaaggtgttccaaagaggctaaccttcgacgaaatccagagcaagacatacttggaagtgaagggactggaactgctaatcagtgcccaaccattgaaggtggagtggactcatttgccttcaaggcagggaaatacaaggcccagaagttgtgcctggaaccaacttcctcacggtgaaggcagagggtgtggccaaga

SEQ ID NO: 3971 - DNA, 292 bp, Glycine max
  unsure (1)..(292): unsure at all n locations; Clone ID: 700558814H1
ctagagcgtaancatggngcactcagagaagcaaacccagttgtaccatcgttgcgatctttctagcattttgttgttttgtttcttcttcgaaagcaaagcttganagtctccaacatgcgcccaaagctgatgggtctctaagcttcttggtggtggagactggggtagaaaaggtgcttataaccaatctcttgtcgcttttcagatgggtgtaataggagagaattggacgttgatttngtgatctcaacgggggataacttctacgacaanggattaaccggatgtt

SEQ ID NO: 3972 - DNA, 293 bp, Glycine max
  unsure (1)..(293): unsure at all n locations; Clone ID: 700558815H1
gaaaacagcatcgaacccgtcgtagcaganaaacttgtcaccatggtttcttccgacaaggatccacgagaggatgtccttcaagcctggtacatggatgatagtgatgaagatcaaagactcccccaccacaaagaacccaaggagtttgtctcgtggaccaacttgctgaacttggagtccttagctggaaactagatgctgataaccatgaaaatgatccagagctgaagaagattcgtgaagagcgtggttacacctacatggatgtttgtgaggtctgcccaaaagtt

SEQ ID NO: 3973 - DNA, 296 bp, Glycine max
  Clone ID: 700558816H1
gctaacgcgtgcatagcagagtcagagacagagacgcagccatggggcggagacctgcgaggtgttataggcaaattaagaacaagccataccccaagtcacgtttctgccgtggtgttcctgatcccaagatcaggatttatgatgttggtatgaagagaagggtgttgatgagtttcctttctgtgtccatctggttagttgggagaaggaaaatgtttcaagtgaggccctggaagctgctcgcattgcttgcaacaagtacatggccaaatttgctggaaaggatctttcca

SEQ ID NO: 3974 - DNA, 287 bp, Glycine max
  unsure (1)..(287): unsure at all n locations; Clone ID: 700558821H1
gagatgcaatatgttgataaggaagaaattaaaaatattgaagataaagtaatcagttctgaatctgagaaagaagccttggaagggaggctccaatcagctataaatcaacttcaggaatcagaganaactattggcagcttgagattggagtacaaaccttgaaagaattgaatcgaatacttgaggagcaagtacaaaatcatgcattcataaatgtagatcttgacactcagctaacagaaactgaattanaagaagctaatcacaaagttttggcatagaag

SEQ ID NO: 3975 - DNA, 278 bp, Glycine max
  unsure (1)..(278): unsure at all n locations; Clone ID: 700558823H1
gccatgaaaatacagaatcctcaatcacatcagattcagaagatgctagccggcaatccgaattaagaaataatttggattgcntcgaaactgtcttgtctcattgtcatgatgtttctatagtgaatagccagaatgcaaatgggagggtttgacaagaaatccaagctcactaattagttcatccttggatggtacaagaaattatgcattggggaatcctattgtggaaactgcccaaaattttgacaatgtttttccaccataatgtggttctc

SEQ ID NO: 3976 - DNA, 207 bp, Glycine max
  unsure (1)..(207): unsure at all n locations; Clone ID: 700558826H1
atcagattgatgcaaatgttcaacgggagatagttaatcatcgatctttaaggcatccaaatatnatcaggttcaaagaggtatttctgacccctactcatttagctatcgtcctagagtatgctgctggtggtgaactcttcgagaggatatcaatgctggtcgattgagtgaagatgaggcaagatttttctttgcaacaactaa

SEQ ID NO: 3977 - DNA, 290 bp, Glycine max
  Clone ID: 700558827H1
atatagcccaagccctatacaaccaaaccctaacacacacccatttgattcagtttccatgggctagcctcaaggttgcatttttggctgcagtgctctgcatggttgtggtgagtgcacccatggcacatgcagctatcacgtgcgggcaggtgcgaatagcctgatcaattgcatcggttacctccagaacggaggaacgccgccgtcgggatgctgcaacggagtgaagagcctcaatgccgccgccaagaccaccgccgaccgccagacggcgtgcaatgcctcaa

SEQ ID NO: 3978 - DNA, 289 bp, Glycine max
  Clone ID: 700558828H1
cacgaatctcaaatacattctggtgccattttatcttgcggagttgacagaaaaaatagcacaggatgacaggatacagattctaaagtcttcccaggcaaaacttaaggagtttatctcattttgtgaagcaatggagctggtcccaaaagagagttagaatcttacattgatggggcaccaaaaactgttgctgatcagagggccaggaagatcgctaggttcaaacgtcagagagctgcagaatcaaagttgttggaaataaaagagcgaaaggaacgactgggcg

SEQ ID NO: 3979 - DNA, 292 bp, Glycine max
  unsure (1)..(292): unsure at all n locations; Clone ID: 700558830H1
tgataaattggttgaagatggnangatcacaccantcaaggaaatcacacctcnaccaatncnctgaggaccttantactgcaattaagagtggaaaagtccgtgctccaactcatattatttccaccatttctgatgacagaggagaggagccagctatgctggtgtacccatgtcttccattattgaaaaaggttatggtgttggtgatgttatctctgcttttgtggtttaaacgaagccttccccgttactgtactcaatttattgagatatgcatcatgcttgtgcc

SEQ ID NO: 3980 - DNA, 292 bp, Glycine max
  unsure (1)..(292): unsure at all n locations; Clone ID: 700558831H1
ggccatttattcccactgtttattgaacatggnacagattttggctccctctacgcaatggcagatgngaatcctncaaaatcctctcccaatgcaagtcccattacatcanacatgtggagtnctttattgtggaaacaaaataagaaagtttcaccacaagttctgctaaatttagagtgatggcnattaagtctgacaatagcatcatcaacaggctagagggtctacttagtttggatatcactccattcacggacaagataattgctgagtacattggattggggga

SEQ ID NO: 3981 - DNA, 286 bp, Glycine max
  unsure (1)..(286): unsure at all n locations; Clone ID: 700558833H1
caaaaaaccgccatggacagtgcagacgcgtggcgcgtggccgcgtgtggcaactccaacgtcaacaaaataatgctccgcttccgcccgatcgcgccgaanccggtcaccggaattnccgccgccgaagctggctccgccgtcggagaattactcagaacaaccacgtgtcattcctggggaagagaccgaagaggaagtacgttaggattcggaggaacagtggatacgtgagaaagaataacggagacagtaacggaaaaagtaacggtaacggtangatgag

SEQ ID NO: 3982 - DNA, 289 bp, Glycine max
  unsure (1)..(289): unsure at all n locations; Clone ID: 700558834H1
ctttctcttccaccgccatcatctcttataacctccacngccctacacacccttntaatatgcctcantccccccaccacctcccactctnttnttttcacacccctcctcattcttcttcttcacactaattcagaatcaacatgaacccaatgatgctaactctcctaagccgttggagattctgcagatgaaccctgttcctccgtttttgtccaagaccttcgacctcgtcgacgacccgactctcgaccccattatctcatggggctccaccggttttagcttc

SEQ ID NO: 3983 - DNA, 283 bp, Glycine max
  unsure (1)..(283): unsure at all n locations; Clone ID: 700558835H1
atttctaatatttaaaatagaaaatatagtcttatagaagcttttggaatgctccaaattctacttgagtatccgtatttatagtagcttccatgttcatgcttatcccaattgtcgcttcagtttattacttttntcttttggttcctagctagtttcctagggacatttattagcattctctttttgataatgtatcattgttagtttagcagattggttgtnttattttacaatttcctaacaatatgaactttctggatgcagaagctatggaactatg

SEQ ID NO: 3984 - DNA, 284 bp, Glycine max
  Clone ID: 700558836H1
caactacaaaggttgctgtaggagataagatattgaagtagtgctaagtgcctaacacctgcagtgaacaatggcctctgcatcagcatctcttctcaagtcttcacttgttcttgacaagtctgagtgggtgaagggacaaacacttcccaaccttctgctgcatcagttgtgagatgcaaccccaccaccccatcaggcctcaccatcagagctggttcctatgctgatgagctcgttaagaccgcgaaaacagtggcttcaccagggaggggtatttggcc

SEQ ID NO: 3985 - DNA, 282 bp, Glycine max
  Clone ID: 700558837H1
gctgataatgggggaggtcaagtttcatcgcgggtgatattggtggagagatatagcaatgatatgtattaggtgatgattcacagttgcaagcctttcttgttgaggaggataggtctacgccaaacagttccctaccaatgtgactgatggatctgtcacaccctagtcacttcaagtcttctaaaggtgggtctcaaaggatggcattggagctgttggacgcttattcattggtgggagatttggaagcctttttgatgatgatcccaagcatggaga

SEQ ID NO: 3986 - DNA, 287 bp, Glycine max
  unsure (1)..(287): unsure at all n locations; Clone ID: 700558838H1
tcatcacttactggaagccttgttgtgagtaagaganaaggcttcctgcaccgagcacaccaacttgatacctctgattctttctntgcttagaattccacagaatatggagacacnntnttttcaatcactccccacctttggaattcaaggtttgagcaaggaggaggaagactcattgctagggcaagtggaaatatggaggtacatgacatgcttcacggactccgtggccttgaaagctgtcatagagcttcgtatagcggacatactagaccgttatggta

SEQ ID NO: 3987 - DNA, 205 bp, Glycine max
  unsure (1)..(205): unsure at all n locations; Clone ID: 700558839H1
gtggtttggtaatcattggagctggacatttaaaaaaagaacagtgtntctatattgtatatcttggatggaatgcttgtattgatagcatgaagttgagtatctcgctgtagatctgcttttaatnngtgctttaaattcactagcgtgtcaggaacttatattggttggtttttggcaatgaagtgtatcataatctactggt

SEQ ID NO: 3988 - DNA, 286 bp, Glycine max
  unsure (1)..(286): unsure at all n locations; Clone ID: 700558842H1
tctccgatggctctctctgcgcatatttgccgtttccccgccacacgcgctgacacttctttgccggagagtctcaccagaatccggtgccggaaacctctctccgtccgatgctccggcgattccacttccggctctgtgggttcggagtcgatccgaaggtgtttcggaagaaccttactcggagtaagaattataaccgcaaaggatttgggtacaaggaanagaccctccaatgcatgaatcgcgagtacaccagtgatatcattaagactttgaagaaang

SEQ ID NO: 3989 - DNA, 287 bp, Glycine max
  unsure (1)..(287): unsure at all n locations; Clone ID: 700558843H1
anagtgagtgagtgagtagcagctagcaatggaaattactgccatggcttcttcagctactcctccacgaccttctcttccaactccttccacttctccacacacagtagtcacaaccacctttagcaaanctcaactcagacgctctcactagcactaccaacttcaaccaccatttcattgctcgctctcttcgcccctccaaacgaagccaaagccgctgtcagcatcgccaaggaccagattgtctcttctctcacccaagtggagaaaacgctggacaggtt

SEQ ID NO: 3990 - DNA, 172 bp, Glycine max
  unsure (1)..(172): unsure at all n locations; Clone ID: 700558847H1
caaaaaacactgcacctcttcttctgggtacgccactttctcttctttttaatttttnnttgttccttcnttttcttcaacccctctattcgcaaaggaagcaacggaatcgattctgttcagttttcctcgttttgagtttaaattcacagattttnaggaaacaaattaa

SEQ ID NO: 3991 - DNA, 172 bp, Glycine max
  unsure (1)..(172): unsure at all n locations; Clone ID: 700558848H1
tcaaatctcanactctctcncttacagccatgtcnatggattctatggccacttncatcggagtctcggtccccgtgctccgcttcntcctctgcttcgccgccancgtgcccctcagcttcctctgccgcttcctcccccgcgcctcggcaagcacctntactcctccgtc

SEQ ID NO: 3992 - DNA, 283 bp, Glycine max
  unsure (1)..(283): unsure at all n locations; Clone ID: 700558849H1
ctgatttagttagcatggactggaagaaaatgaagattccggcagttcttccttcttcagagcatgcatggttgttcaagttgatgcaaccaatgaaggcactcctacaagcaaaagaagatttacagtcagtggggaaagaaattcagatggtgaactagctgatgcaacaaacatgagcattattcaagtaaggaaagctatagaggttggccgagctgcaagaaacaagctncataaagcacaatctccggcttgtgttgttcgtgattagcaatatttt

SEQ ID NO: 3993 - DNA, 282 bp, Glycine max
  Clone ID: 700558850H1
caatattgtcattcagattgaatctattgggaaaatgttgcaggctgagtatatactggacctgcagaagcaacttactttgatgggcagtgaagcaaggagagaatccaatggtaccctttctccagaggagtccattcctagcagaccatagacaagctccgatcacaactggatgatgctatagctagtgaatgcccattttgtggcgacttgatgatccgtgagatttctttgcctttcatcaatcctgaggaagagcagcatgtgctatcatcatgg

SEQ ID NO: 3994 - DNA, 281 bp, Glycine max
  Clone ID: 700558851H1
gttcattttctctgagatcattcgaatgctgcatgaagagaacattgatgttagaagtgccaattcctcacttgctggagactcgatgcttcatgttgtgcatgctgagattcctcaatctttacttcaatttggagccaccaaagtagccagagattgaaaaggtttgtgaatggatcctgcagtgatgtggaaacacagcccgagttgtgggattttgaaattggtactgatgatatgtggggtttgtatatcttacaaggatgcattttacaaatgtt

SEQ ID NO: 3995 - DNA, 282 bp, Glycine max
  Clone ID: 700558853H1
ctcagagatccctgatctcattgatgagtacaggaaggtgatgaaggattttgctttgaggttagagaaactagcagagcagctgctggacttgttgtgtgagaatcttggcctagagaaagggtacctcaagaaggctttctatggtcaagaggaccaacttttggcaccaaggttgccaactaccctccatgccccaacccagagctggtgaagggtcttcgtccccacactgatgccggtggaattatccttctcttccaggatgacaaggtcagtgga

SEQ ID NO: 3996 - DNA, 283 bp, Glycine max
  Clone ID: 700558854H1
caaaaaggtaaactttttgcaacaaccatggttgcaatggcagcagcaacagcatccacccagttgattttctcaaagccttgttccccttcacgtctatgccccttccaactatgtgtctttgacactaaacaagtgctatcaagtggaggagaaggcatgtggggggttctggagttaggtgcatggctgtgggggaagcagcaaccactgggacaaagaagagaagtggatatgagcttcaaacactcactagctggttgctgaagcaggagcagctggg

SEQ ID NO: 3997 - DNA, 285 bp, Glycine max
  unsure (1)..(285): unsure at all n locations; Clone ID: 700558855H1
gtctantacatacanaacacacagacccaacaagaacaacatnnaacggtgccggcttcatctttacgtaatnattgcggcaacaatcgaatcccatcttgcgatttcgcctcctcaaaccccgcgagtnaaattccctcccgagatccnattgcttccacgtcgaatcggtgnacntacggtgtgttttatncatnagnnaagatnggaatgcaagtttnantgatnaatactnataatcaatcatcgtagcgagatggtgtcgtcgagccaggtggtgaaagt

SEQ ID NO: 3998 - DNA, 284 bp, Glycine max
  Clone ID: 700558856H1
cgaaatatggcttcaactcatctgcttcccctagcaaccttcttcttacttctctccgcttcttatctccagattgctggggcggaagcacaaccgttgactagtctcaagcttaactctcatattcttcaggagtctactgctaaagagttaatgaaaatcccgaggcaggatgggaggctgctataaatcctcgtttctccaattatacagttgaacaatttaagcgccttcttggagtcaaaccaatgcctaagaaggaattagaagtacacctgtatatc

SEQ ID NO: 3999 - DNA, 284 bp, Glycine max
  Clone ID: 700558858H1
gggagatatcaacatggccaagtgccagtaatgtcattccaggccaggttacatataccgtggatatacgagcgatagatgaccttggacgtgaagctgttatctatgatttatcgaaacaaatttaccaaatatgtgacaagcgttcgtttcctgcattattgagcacaagcatgatgcaggtgctgtgatttgtgattcggatctaagttcacagctcaagtcagcagcttattctgcactcaagaagatggagggtgacattcaggatgaagtgccaacat

SEQ ID NO: 4000 - DNA, 284 bp, Glycine max
  unsure (1)..(284): unsure at all n locations; Clone ID: 700558859H1
tgttccctcaaaaacttgtctcatccatgcaatttgactgggtatttggggcactgttgcttgcagctccatagctgttttctctcaataaactacattcttctgacacggatagtgagagaataccctgcagaactggtggtggtactagtcgcattgcattaacatctatactatctgttcctgctgcactgatttcagtaaaggatctaaaagctttgagactggggtttaatatggagcttatagctattggatgttcagcanttttgtcttatcctttc

SEQ ID NO: 4001 - DNA, 280 bp, Glycine max
  Clone ID: 700558860H1
gctaatgccttgaagacatcagcactaggtgcctctggcatatttattggacgccctgtggtgttctccttggctgctgaaggagaggctggtgtaagaaacgtgctgcggatgctacgtgaggagtttgagctaaccatggccttgatggttgcacctcactcaaggatatcactcgtgatcacattgtcactgattgggaccaacctcgcattcttccccgcgcatgccaagatatgaaaaatttgctcctcattgagccaagtttgtataagtggtg

SEQ ID NO: 4002 - DNA, 285 bp, Glycine max
  unsure (1)..(285): unsure at all n locations; Clone ID: 700558861H1
ccgatggcgtttctcgagnagaagctaaagaacttcgagatgaggttaaggatatnttttatcacgcctttaatggatacatggaccacgctttccccctcgatgaattgagacctctctcctgcgcaggacatgatacgcttggtggcatgcgttaaccttgattgactctttagacactttggctttacttggtgaccgccaacgattctctgcttccgttgaatggattggtaaaaatcttcgctttgatataaataaaacggtttctctctttgagactac

SEQ ID NO: 4003 - DNA, 287 bp, Glycine max
  unsure (1)..(287): unsure at all n locations; Clone ID: 700558862H1
gctctatttctcagtctctgtgtttgcggctgaggattccgaacgagtgaccttcttgcgtttctcgcaaagtttaagtaatcatgggtaaggaaaaggttcacatcaacattgtcgtcattggacatgtcgactctgggaagtcaactacactggtcacttgatctacaagcttggaggtattgacaagcgtgtgattgagaggttcgagaaggangctgccgagatgaacaagaggtcattcaagtatgcctgggtgctcgacaagctccaaagctgacgtgaaa

SEQ ID NO: 4004 - DNA, 285 bp, Glycine max
  Clone ID: 700558863H1
ataagttgcaaacttatctgctatcaagagatcatttgaagttgaagtctgagtttcaagatggaaatggaaagaaaattgtcgattcaattgaacagctacctgctgtggaagtggttcttggtcagcatgtctttttcactgtggggactattcccttgctggaaaatctgactgatcatattttccaagtgttccttttgatcttttatccagtttgcatgctatctgtttgcaagattaggaatacagaatatacccaggcatgcctaattgtacttttga

SEQ ID NO: 4005 - DNA, 280 bp, Glycine max
  unsure (1)..(280): unsure at all n locations; Clone ID: 700558865H1
attttaataacactagagccaaggtaacttgtcctctaaaagatttagtgttgactttgccaaccantnagacactttcaaaccttgtccactagaaatgaganaagcatcaactttccaaccaataatanactntcaaactctgtcacttganacgaaaaatgcatcactctggaatggggattaggtgctcctaaatagagtatttcataataacactagtgattgggatcttgagatcttagagtagcantaatctctctcataaagttntttttnc

SEQ ID NO: 4006 - DNA, 278 bp, Glycine max
  unsure (1)..(278): unsure at all n locations; Clone ID: 700558867H1
cttgattgntgggctgttaatcaatcatgcatagttttttatcgtgttctgttcaaatatttngggatatatgcatcttcctanttaaatttatcatccgtcatggtgagtggttntgcaatggtaacaactgcatttagtggcccaccaacttccatagantggatttttnggtattggttccagtttccacttagttcctctgtngattnatgtgnattaagagatcttctgagggcttgggttcctctagganttatgttagcagtaggatagta

SEQ ID NO: 4007 - DNA, 280 bp, Glycine max
  unsure (1)..(280): unsure at all n locations; Clone ID: 700558868H1
tgccttgttaaacggaatcaattattttgtgttgcagacagagaatganatctaaaacaatatctgaccanacattccaaatactatttataggatttttttgaggatcacaacttcacaagtgtttattagtccaaactattaaggaccctaagttagataacaggtgaatttataagaaaagtttgaagagaatagtataaagccgctggcacctgagactcaatttcaaacgctgtgttgtgttctgaactggttaagggcagctcctccaatctcc

SEQ ID NO: 4008 - DNA, 275 bp, Glycine max
  unsure (1)..(275): unsure at all n locations; Clone ID: 700558869H1
tgantcggtatcaacgagtgaccgagtcgaaaagcnngtcaccactccccgagntgcatggaccctctgcgaagctttnagtcgcccaantccaagggctatcgagctctcccggcgacctcactcgcctcccacantgtctaaagcnagccgatgantcgcttcgatccgagtcaantcgcctcgctccgattctncacacagctggacccntccattcactccctcgggtttctctacatcctagaagcttccatgaccggtccggttaccaa

SEQ ID NO: 4009 - DNA, 284 bp, Glycine max
  unsure (1)..(284): unsure at all n locations; Clone ID: 700558870H1
tatggctcgtcactccttgctcttagccctcctacctcttcgccgctgtnnccagcgccgcgatnggcggtggccgngtnccgacgccgacgacatcctgatccgtcaggtgntgccagatgttggcgaaccgaagaggaggacaaccgntgaacgccgagcaccacttcgcgagcancaangccaagttcgccaagacctacgccaccaaggaggagcacgatcatcgcttccggcgtcttcaagtccaacctccgcagagccatgctgcacgccaactcgac

SEQ ID NO: 4010 - DNA, 283 bp, Glycine max
  unsure (1)..(283): unsure at all n locations; Clone ID: 700558871H1
aacgttagtgagaccaacccaacacacaaagcaagancaaaaagtatcncaatcaatcancaaaagcttnacttgcatanaganacgnacacatattctngtnacncagaatggaccaacaagagggtaacacgtggacaatgccaccgtctgggcggttgagcagcgaaaccgccgccgtcttcgcngctcttactctctgttgctcacctccacctccctnctcgtactcttcctcgtactcgtgctggtgttctcgctcatcgtggttccgacgtgcatt

SEQ ID NO: 4011 - DNA, 284 bp, Glycine max
  unsure (1)..(284): unsure at all n locations; Clone ID: 700558872H1
cctcggtgaggtcactgacccaatctacccagntggcagcttcnncccattgggccgntgctgatgacccagaggcttttgctgagcttaaggtgaaggaactcaagaacggacgattggccatgttctctatgtttggcttctttgtcaggccattgtcaccggaaagggtccattggagaacctcgccgatcaccttgctgaccctgtcaacaacaacgcctgggcctatgccaccaacttcgtccccggaaagtgagcgtcaaagaacgaaatgacttttg

SEQ ID NO: 4012 - DNA, 284 bp, Glycine max
  Clone ID: 700558873H1
gcccaagccctatacaaccaaaccctaacacacacccatttgattcagtttccatgggctagcctcaaggttgcatttttggctgcagtgctctgcatggttgtggtgagtgcacccatggcacatgcagctatcacgtgcgggcaggtacgaatagcctgatcaattgcatcggttacctccagaacggaggaacgccgccgtcgggatgctgcaacggagtgaatcgcctcaatgccgccgccaagaccaccgccgaccgccagacggcgtgcaatgcctca

SEQ ID NO: 4013 - DNA, 283 bp, Glycine max
  unsure (1)..(283): unsure at all n locations; Clone ID: 700558874H1
gatgataaaagaggacatgttgcgagatgttactgcagatgttacggttactgatgaagatgatgcttgtnnctcactgtgttgagcaagataataatgataataatagaaagagcagtaataagagaggtaggaattcgaggaataattcaagggtgctgcgaagaaatgggaggagaatcaacggaggtggaagtgtgagtgggatagggaaagattggagcttgatcggagattgaaggagcaactgaatttaagtcgatctgggtcgggtggacagcga

SEQ ID NO: 4014 - DNA, 285 bp, Glycine max
  unsure (1)..(285): unsure at all n locations; Clone ID: 700558875H1
tgtgaaagcatgcaaatggttttctgtctgggggatttcttaaaagctgtccttcatcttacaatcccaagcactacaatgaactctacaatttccgagctagaggcttagttgcaagagcatctgctgatccaagggataatttggtccatttgctcccctccaatttgagtcaccagttgcncagcttttggaacaaatctcaaatacccatccgcatctactaccagcaggccattgatcaacaactagagaatcttcagactgctagagatgctcagaatg

SEQ ID NO: 4015 - DNA, 275 bp, Glycine max
  unsure (1)..(275): unsure at all n locations; Clone ID: 700558876H1
tttaatttattngcccatcctttctttgtcaaacaccaaagtccaaaccattattngctccgatcancatgangttgatcantaaaccatcgcaactacgttccctcttgagccttntctgctccattttgctgctcttgaattagctttcgtggctgcggaggacccttatagattcttcgactggaccattacctatggtgacatttatcccctaggagttanacaacagggtattcttatcaatggccaattcccaggccctgantctattt

SEQ ID NO: 4016 - DNA, 285 bp, Glycine max
  Clone ID: 700558877H1
caaaaaaaacaaaaacagaaacaaaagatggttcatcagaggcaaaacaacatccatgttcttgttcttccataccctgcccaaggccacatcaacccccttgtccaattcgcaaaaagattagcttcaaagggtgtcaaagccacagtgccaccacccactacactgccaactccatcaatgcacccaacatcacggtcgaagccatctccgatggtttcgaccaagccggcttcgcccagaccaacaacaacgtgcaatcttccttgcctccttcagaacaaa

SEQ ID NO: 4017 - DNA, 286 bp, Glycine max
  unsure (1)..(286): unsure at all n locations; Clone ID: 700558878H1
ggcttctcttgtttgtctgattatcctgcctgtaatttttgttcaagggaaaccattcaaagggctgtagttgattcattggctttatttggggcaggagctatgttgggggatgcatttcttcaccaattaccacatgcttttggtgggaacactcccattctcatggtgaccatggagatcatgaccatcatgatagttctggacatgatcatgcacatnctttagccgatctttccataggaatatccatccttgctggaattgtactctttcttcttgtggg

SEQ ID NO: 4018 - DNA, 288 bp, Glycine max
  unsure (1)..(288): unsure at all n locations; Clone ID: 700558879H1
aggacatgcaaagtggtgttgtcacttctctctacttactttgttgcatcttagaggatagtccangatcaaagatttggcaaataccatagtcgttgctcttttntatcccttagagacctttacaagattttctaggggtaaagtcaaggctatatctctgaatttggtcttacatccataagccaagaaccagatgatgataatattgccaagggcaatgcaggatgcttgacagtgaatgtgccaaactcttctagttcttcaggtttcgacccagcaagtgtt

SEQ ID NO: 4019 - DNA, 280 bp, Glycine max
  Clone ID: 700558881H1
ctctttgcgcagttccctacctctcctttcaagatgcagatccttcgtcaagaccctcaccggaaagaccattcacccttgaggtggaaagctctgacaccatcgacaacgtcaaggccaagatccaggacaaggaaggaattccccggatcagcaacgtctcatcttcgccggaaagcagctcgaggacggccgtaccctcgccgactacaacatccagaaggagtcaacccttcaccttgtccttcgtctccgtggtggcatgcagatcttctcaaga

SEQ ID NO: 4020 - DNA, 278 bp, Glycine max
  Clone ID: 700558883H1
atgatgttaaagtttctgtgaatgacattattgtcaaagttgtagctgctgctctcagaaatgtaccagaagcaaacgcatactggaatgttgagacgggtgaggtggttttaaatgattctattgacatatgcatagcagttccactgagaagggcttgatgactccaataataaaaaatgctgatcagaagacaatatctgctatctcctcagaggtcaaggaactagctgcaaaggcacgtgctggcaaattgaagccacatgaattccaagggg

SEQ ID NO: 4021 - DNA, 278 bp, Glycine max
  unsure (1)..(278): unsure at all n locations; Clone ID: 700558884H1
acgaagggctatatagcataaacatttgagtcttcattgcacaatgtcgacctcttccattaacgggtggtgcctctcttccatctccccagccaaancctctctcaagaaggccacattaggcccttctgtcttcgcaaccgtagcannnnnnnnnnnnnnnnnnnnnnnnnnnnnnnnnnnnnnnnnnnnctcattcaagacaggcctgtctttgctgcccctgcccccatcatcaccccaactgtgagagaggatatggcaaaggaatngagcaa

SEQ ID NO: 4022 - DNA, 279 bp, Glycine max
  Clone ID: 700558885H1
ctgagatccttaagagaatctctaagatacagaagactacaagtggagccagttatgttatcctgagagataagtgacaatgtagaccccaatgattggttttgacggaaaatgcagcattaagaagaaaataagttcatatacatgtatatttttcacattttgggcccaatctttgagatttatactattaagttaatgcccattaagtttacgacttttgctttaaaactcgttgaagatcagttttcttctgggagatgcaaattgtacaagagt

SEQ ID NO: 4023 - DNA, 280 bp, Glycine max
  unsure (1)..(280): unsure at all n locations; Clone ID: 700558886H1
aaggaagaatgtgcattgtaagcagcgtcatttctgcttatcctattcgagcttccactnccaattgttaccnctccactttccattcctcgcaatgttatcaacgctcatcaagccattgnccacccctttgtgccagaggttgtaaagcagtggatgccttgcattcagagttccgggctgtggataatttggttgcgtgcaataccacccgtgtccttaaagctttccagaatgctcgagttggatctcatcactttggtggttccactggtatggt

SEQ ID NO: 4024 - DNA, 282 bp, Glycine max
  Clone ID: 700558887H1
ccaatatattccattctctctgtgtatttccctacctctcccttcaagatgcagatcttcgtcaagaccctcaccggcaagaccatcacccttgaggtggaaagctctgacaccatcgacaacgtcaaggccaagatccaggacaagaaggaatccccccggaccagcaacgtctcattttcgccggaaagcaacttgaggacggccgtacccttgctgactacaacattcagaaggagagtactcttcacctcgtcctccgtctccgtggtggcatgcaga

SEQ ID NO: 4025 - DNA, 281 bp, Glycine max
  Clone ID: 700558888H1
ccatttcatactttccgacacctaaaacttgagcatgctgagtaagtacctagctccaatttatactcatctcaaatgggtattagattttgttctctactaccctttttacatgctttatgattctcatccacccataaatcttgaactgaattgagtacatttcattatgaattttcctctggctcagaggaacatgtggattgtgctgtgtgtctaagcaaatttggagaaggagatgaggtgattagagttatgagatgtgagcatgtctccacaaa

SEQ ID NO: 4026 - DNA, 280 bp, Glycine max
  Clone ID: 700558889H1
ggcatccccgtggcttcaagaagagaatctcaatggaggcccaggagctgaagcgcgtgttccagatgttcgaccgcaacggcgacgggagaataacgaagaaggagctgaacgactcgctggagaacctgggcatcttcatctctacaaggacctgagccaaatgatccagaggatcgacgtcaacggcgacggttgcgtggacatggacgagtttggggagctgtatcagaccataatggacgagcgcgacaatgaggaggacatgagggagccttca

SEQ ID NO: 4027 - DNA, 281 bp, Glycine max
  Clone ID: 700558890H1
actccacggcgcagatccgaggagtttgggaaaccctaattcattcctctttgcttctatctctattaccctaacaccagtgatggcaggtttggctccagaaggatcgcagtttgatgctcggcaatatgactctaagatgaataattgctttccgctgatggacaagaatttttcacttcatatgatgaagtctatgatagttttgatgcaatgggccttcaagaaaatcttctcagaggcatatatgcttatggttttgcagaggccttctgcaatac

SEQ ID NO: 4028 - DNA, 280 bp, Glycine max
  unsure (1)..(280): unsure at all n locations; Clone ID: 700558892H1
ggaagcccgagaatcaaaatcatgcaattatatttacgcgtggaaatgcagtccagacaattgacatgnntcaggatnactattttgaggaggctttgaagatgaggaaccttcttgaagaatttcattcagatcatgggcttcgcctcctactatacttggtgttagagaacatgtcttcactggcantgtctcatctttagcatcatttatgtccaatcaagaaactagttttgtgacttnggggcagcgagttttagcaaatccattgaagtccgca

SEQ ID NO: 4029 - DNA, 281 bp, Glycine max
  unsure (1)..(281): unsure at all n locations; Clone ID: 700558895H1
gagacagtggccaagttgaaggtggcaatcaatggtttcggacgcattggtagaaacttccttcgctnctggcacggccgaaaagactcaccccttgangtcgttgttgtcaacgacagtggtggtgtcaagaatgcttcgcacctcttaaatatgattccatgctgggaacttttaaagcagatgtgaaaatactggacaatgaaaccatcactgttgatggtaagcccatcaaggttgtttcaagcagggaccctcttaagcttcctgggctgacttgg

SEQ ID NO: 4030 - DNA, 282 bp, Glycine max
  unsure (1)..(282): unsure at all n locations; Clone ID: 700558896H1
cacgggttttgagcaaaatgggtgttgtgganggtctcttggcattgggtttgattctgaatgtgtgtgttgtgtgcaatggaggcacaagcagccccttcgtcaggaaagttgagaaggctgtagatatgccacttgacagcgagtctttgctattcctcctggttataatgccccccagcaggttcatataacgcaaggtgacctagtggggaaagcagtgatcgtgtcatgggtgactgtggatgagccggggtcgagcgaatgcgttactggagtgag

SEQ ID NO: 4031 - DNA, 157 bp, Glycine max
  unsure (1)..(157): unsure at all n locations; Clone ID: 700558901H1
ccattatggnttnntctgatgatctctctacacctttgctttctgcgnngtctcagcntgcnttgttcggaattccctcctgtnccggtcatcacacttctttctctggtcactccctcagattcaccctctctagctagttcccaacaacaaactc

SEQ ID NO: 4032 - DNA, 232 bp, Glycine max
  unsure (1)..(232): unsure at all n locations; Clone ID: 700558903H1
attcagaataacaataaagggtggatgaggatccagaggttcttggncacactggccataactgtctccataactcttgggaaatggaaaccccgttcagtgcttcgacggcggtagcagccaaaaacagcaacacagtttgtgtgaagagctcattatcccctacggttacccctgctccgagcatacgattcaaacgaaggatggtttcttgttaggtcttcaacgtgtc

SEQ ID NO: 4033 - DNA, 295 bp, Glycine max
  Clone ID: 700558904H1
cttcactctgaaccaaataccatagtcttctctttgtccgtgacaaaacagttcccacaaaaaaaagaagaaagaaaaaagaaaagcactaaaaaaaaatgaagaagggtttctcccttgtgctgctgattcttctgatccagtacaacaacgttgtcaacgcctacaacaacaaaaactgtgtcacagaggattgcctcatcggcaacaaggatttggaatcagagttctactttggatcccatgtggccagaatgctctacgatgtgagccaatctgtgagtggcaaaacagg

SEQ ID NO: 4034 - DNA, 296 bp, Glycine max
  unsure (1)..(296): unsure at all n locations; Clone ID: 700558905H1
ctctcccttagtcaaaagggactcgttgttcttctccnangttntttagagaagcangaatggtgaagatttngctgcattggtagctggatatgtggggggtcctactatggcagncattgcacttaagtgcccatncattgaagttgctgttgttgatatctctaaatnccggcattgcagcctggaacagtgaccagcttcctatctatgaacctggccttgatggtgttgtgaagcaatgccgtggcaagancctcttcttcagcactgatgttgaaaagcntgtcttgagg

SEQ ID NO: 4035 - DNA, 289 bp, Glycine max
  unsure (1)..(289): unsure at all n locations; Clone ID: 700558908H1
ggcgcgtgttgcgttttggcataatatttgtgagatgaggaatgaaganatggatgatgagtggaggtttcaggattttcgatgatgagatgctgccggaaaatggaatacgatcttctgcttcccttcaggccagggatcatattgcgcactatttgttgcaccatgggagggctgggactggctttttctagtctctaggttctctttcgggttttctgcattntttagaactttactactatctcatcttttcgctatgtcacgttgaataactagagataactgg

SEQ ID NO: 4036 - DNA, 294 bp, Glycine max
  unsure (1)..(294): unsure at all n locations; Clone ID: 700558911H1
ggaagttggaagtcatgggcagcaacattgatggcagcaacaacaagttctggtactcttaaagcaactcctttnccttggccaaggcaagggtgccaatgccaatgctcttagggatgttgtctccatgggaactgggaagtacaccatgggcaatgatttgtggtatggaccagacagagtgaaatacttgggacccttctcagctcagaccccttcatacttgaaaggagaattccctggggattatggatgggacactgctggcttatctgctgacccagaagcatttgc

SEQ ID NO: 4037 - DNA, 293 bp, Glycine max
  unsure (1)..(293): unsure at all n locations; Clone ID: 700558912H1
gccaccatgtttgtcttnaaacccacctcttctcttctctttntcctcctcagtattcatacttctgcttcttcagttanctcactcaccgtaccgccgcgaggnggggccccactcgacctcaccactactccgcaacaacaaaccganggcgatgatgattccctcacctacctctggcccctccccgcagagttcacttccggcggcgacactctctccgttgaccccgcgctcacnctcttccgtcgccggaaacggggtggctccgccattctcagagangcttcggg

SEQ ID NO: 4038 - DNA, 296 bp, Glycine max
  Clone ID: 700558913H1
ggctgatttcatcaaggaagacacatgaggctattgagatcctcaagctcatgtcctccactttccctcattggcactttgccaagccattgacttgaggcatttggaggagaatttgaagaacacggtgaagaacgttgtgagccaagttgctaagcggactctcaccacaggtgtcaatggagagcttcacccttcaaggttttgtgagaaggacttgctcaaggttgttgatagggagtacacatttgcatacattgatgacccctgcagtgggcacatacccttgatgcaaa

SEQ ID NO: 4039 - DNA, 176 bp, Glycine max
  unsure (1)..(176): unsure at all n locations; Clone ID: 700558915H1
gttctgtaatagagcaagattaagtntctnatgtatagagaagcttacgtgttgnatttgttttagcatcttgatataggccttgtattagggagacttttgattttctctagatgtggggtatgccccgtttattattgtatcattttggatttaatataattttcatttttncc

SEQ ID NO: 4040 - DNA, 297 bp, Glycine max
  Clone ID: 700558916H1
agaagaacaagtagttgagaactaagaaggagaagcaaatggcttcctcaatgatctcttccccagctgttaccactgtcaaccgtgccggtgccggcatggttgctccattcactggcctcaagtccatggctggcttccccaccagaaagaccaacaatgacattacctccattgctagcaacggtggaagagtgcaatgcatgcaggtgtggccaccagttggcaagaagaagtttgagactctttcctacctgccagaccttgatgatgcacaattggcaaaggaagtagaat

SEQ ID NO: 4041 - DNA, 292 bp, Glycine max
  Clone ID: 700558917H1
caatattgtcattcagattgaatctattgggaaaatgttgcaggctgagtatatactggacctgcagaagcaacttactttgatggggcagtgaagcaaggagagaatccaatggtaccctttctccagaggagtccattcctagcatgaccatagacaagctccgatcacaactggatgatgctatagctagtgaatgcccattttgtggcgacttgatgatccgtgagatttctttgcctttcatcaatcctgaggaagagcagcatgtgctatcatcatgggagataaa

SEQ ID NO: 4042 - DNA, 288 bp, Glycine max
  Clone ID: 700558920H1
gttgttttggcctacgagccagtttgggccattggaacaggaaaggttgctactcctgctcaggctcaagaggtccatgctgatttgaggaaatgggttcatgacaatgtgagtgccgaagttgctgcatctgtaagaattatctatggaggttctgtaaatggaggaaactgcaaagaattggccgcacagcccgatgttgatggatttttggttggtggtgcctccctggaagccggagttctggacatcataaatgctgccactgtgaagaagaatgaaattcgt

SEQ ID NO: 4043 - DNA, 292 bp, Glycine max
  Clone ID: 700558921H1
cttgacacgaaaattgaaatgggcgctgaggctgactactgttgtttcaagtgttggtcattcggggaaacccaggtttaggttcagaatcagaagtgttgctgccacagttagaaacatggccttcagtgcaacctccaaggctggcagattcccttattctcttggacaagaacctactttaccaggaaatgccgagtttttgctccagtgtatggaggaggcaggagtagatggtgcactcattgtgcagccaattaatcataaatttggatcatagttatgtcacaag

SEQ ID NO: 4044 - DNA, 293 bp, Glycine max
  unsure (1)..(293): unsure at all n locations; Clone ID: 700558923H1
ataaatattaattattaatttttatttnnntaataaaatggattgannccacnacatttttgcgagtatnggttaatgcnccccaaaaaaccttatatctcctgtgtaccattgactgctgcaattaacagactttnatttttgtgtaattgtnaacgggctaagaanaaaaaagttaaagntgtatcaagtaaaaganaaanaaaagtagangtaaaattaaatgtatacaaattgtttcatgttgtatgaaaaccgatttcgtangccatgatntnnaggtaatagttaaa

SEQ ID NO: 4045 - DNA, 292 bp, Glycine max
  unsure (1)..(292): unsure at all n locations; Clone ID: 700558924H1
cctcgaatctcgtgcacgtgccgttgcagcaaaaaatgccagannattcagttgggtatgcatactatcagatgcacatggaactagagtggcaaggacacatatgcacgactggttgattcttttgcttcttgtgatcatcgatgctgtcttgaatttaatacagccatttcaccgttttgttggagaggggatgatgacagaccttagatacccattgaaagctaatacaattcccttttgggctgttccgataatagcatattgttaccactggctgtttttctcgttt

SEQ ID NO: 4046 - DNA, 293 bp, Glycine max
  unsure (1)..(293): unsure at all n locations; Clone ID: 700558925H1
cgatgagtcatggtgccaaggtcttgatggtcttgcgtctcgctcagctgccatactaccaggcaaggtgcccgtttcgccaaatggcgtactgttgtgagcatccccaacggtccctctgctctggcagtgaaggaagctgcctggggtctagctcgctatnctgcaatttcacaggagaacgggttggtcccaattgtggagccagagatcttgcttgatggtgaacatgggattgacaggacattcgaagtagcccaaaaggtgtggtcagaggtattcttctaactggc

SEQ ID NO: 4047 - DNA, 293 bp, Glycine max
  unsure (1)..(293): unsure at all n locations; Clone ID: 700558926H1
gcagaagttgagaggatcaagacaagactgctataattagaggcatcgngacaagcaaancagacggatgccaagggcattgaagctggctgagatgaatagaanaaacaggtttgagaacttcaagaatgcttctgaaatgaagccggtgaatacaggtttgaaagcaggggaggcaggttatgatccattttcaaggagatggactagatcaaggaattactatgctgcnaaacctggtgaagaagctgctgctggtgctgggaagttggtggatacaagtgctcctgtgg

SEQ ID NO: 4048 - DNA, 291 bp, Glycine max
  unsure (1)..(291): unsure at all n locations; Clone ID: 700558927H1
gcaaaggattctacccgccgctcgatgggaattgcgcttcaaggcgtctcgtagggctaatccgccttcacgagggtcaccaacggcacgtgcctttngggggccgaggccccctcactgctggtcggcaaacggacggcgggcgcacgcgtcgcttctagcccggattctgacttagaggcgttcagtcataatccaacgcacggtagcttcgcgccactggcttttcaaccaagcgcgatgaccaattgtgcgaatcaacggttcctctcgtactaggttgaattacta

SEQ ID NO: 4049 - DNA, 282 bp, Glycine max
  unsure (1)..(282): unsure at all n locations; Clone ID: 700558928H1
tggagattggtacaagtccaaccacacggacaaaccttacagcaagtngaacgaggccaaacccgcaaggatcgtaccattacggtatgataaacacgacaaagacgatcatattggcgagttcggctggtcaagtaaatgggaagcaaagatacgcaattaacagcgtgtcttatgttgccccagacacccctcttaagctcgccgattacttcaaaatctccggtgttttccgccccggaagcatatctgacagacccactggtggcggcatttaccttg

SEQ ID NO: 4050 - DNA, 292 bp, Glycine max
  unsure (1)..(292): unsure at all n locations; Clone ID: 700558932H1
gaaagtgtgtatctgaactttgacaactcaatttcaccttacgagttttgtctgtatgcaatgttncacgatggggttccattgtacactactaccattattggttgggaatttgtgagatttaagcaaaaatacaaacttataaactgaagatattgcagccccatctcccatctcccttttgtactgttctggccttgcaggctgtataagttatctgacagattgtgcaatcattgtaaacatgtatgctgacatactttagtgaatcacataaagcaatatggttttg

SEQ ID NO: 4051 - DNA, 149 bp, Glycine max
  unsure (1)..(149): unsure at all n locations; Clone ID: 700558933H1
aactccatagccttcaaatccttcgtcggnctccgccagtncgcgccggangtntncgcatttcgccgcncagccaagacccnccactccccaccgnaaattccgcgtcttggctggaaaattcagccccaagntcaatggccggnanc

SEQ ID NO: 4052 - DNA, 288 bp, Glycine max
  Clone ID: 700558934H1
ggcatcgcatgacacaccatggttgccagggtcctgttcatgctgtatttagtgaaaactgggttgtctaccactattttaatctcagagcacacagatatgagatgtcagttgttgaggtctatgatcagtctcgagcggataacaaagatgtctggaagtttgttcttgggaagcataatcttacatcacccatctcttcttattatcgagcagaagttgttacaaaatcacagtcatacttttttacccattctgtgaaagcaatagaggtgacttcgacggcca

SEQ ID NO: 4053 - DNA, 288 bp, Glycine max
  unsure (1)..(288): unsure at all n locations; Clone ID: 700558936H1
gtggacttagttaagcctcttacaatgactccccaggaagaaattganaaattgaggagggcggcagcaaatgncaagcaatgcttgctattcagaagcaacagcaagaattcagccatcaagttcctagctctaataaatcaatgantgaaaaatgtgccatagaaatgcatagtcaactttgtgatggggctgatcctgaaattgaagatntaagaacaactctagatccaccaactgagcaagatgattctaatacaatcnctctggcaattgatgatcttttgg

SEQ ID NO: 4054 - DNA, 287 bp, Glycine max
  Clone ID: 700558937H1
agggtttgcaactgaatgaggctctcacctcgccacgtaatcttttaagcaattaaagaaggaataggataatgattagtgaaaaaagaaaaggctaagcgataattattttgggtaaaagaccaaatgcactagcctatgctttctacacatgttgaggttgtgtaatttgtaatgtacgtaggtcaatgcctctatgaatattgactattaaaacctgtttaatttccactgcagccactgccataagtcccaaacaatgcttcaaaccctaccaacactgcagc

SEQ ID NO: 4055 - DNA, 294 bp, Glycine max
  unsure (1)..(294): unsure at all n locations; Clone ID: 700558939H1
gccatggccacccacgcggtctctagcttctacaaggancgccactaacagcnaangtnancatgccaagngcttgcacantcttncccaacccaatgcgcctcaaagagacttgaggtgacagaattctctgggctaagatccacttcatgtgtgacatatgctaacgatgctagagaatctncctttnttgntcttgtagcttcccaactcactcccaagancaatggatcatcaactcctgtgaggggaganacagtggccaagttgaangtggcaatcaatggtttcgga

SEQ ID NO: 4056 - DNA, 277 bp, Glycine max
  unsure (1)..(277): unsure at all n locations; Clone ID: 700558940H1
cacacctctcctcgttcacgctacccctttctgctctncttctacctttcaagttttnaangtntaaaggtggcagagacattcctatttacctcagagtcgntgaacgagggacaccctgnnaagctctgcgaccaaatctccgatgctgtcctcgacgcttgcctcgagcaggacccagacagnaaagttgcntgcgaaacatncaccaaaaccaattggtcatggtcttcggagaaatcacgaccaaggccaacgttgatacgagaagatatgc

SEQ ID NO: 4057 - DNA, 287 bp, Glycine max
  unsure (1)..(287): unsure at all n locations; Clone ID: 700558943H1
atgaagatgtagaagtacaggaaccattggaagagagtgttgatgcgantcaggaagtgggtgggtttgacttatctcctcggagggataaagcaattccaaagcggaattctcagcttaaacacaaacactctgcatttcgtgcatctcataggggaaggggagttgaaatatctagtccgaaggaagtgaaggcaaccaaatcatggagcaaacatgatcctgtgcctagtgctgaagttaaaaaagttcgggaatccctaaaatcaagttctttggagttacga

SEQ ID NO: 4058 - DNA, 232 bp, Glycine max
  unsure (1)..(232): unsure at all n locations; Clone ID: 700558944H1
cttttggnccacctagacaaccctgtggccaacaatgcttgggtctatgccactaagttttccccagggtcttaaaatgtatatgacttcttcttccctaatccctatgatcccatccctcgtgcttacctttgtgatttatgtgtagattatatgatcacaataattgttggattagtgtacttcttaaggactaaggttcaatttaaacctcggatgtctcttgtttgtt

SEQ ID NO: 4059 - DNA, 290 bp, Glycine max
  unsure (1)..(290): unsure at all n locations; Clone ID: 700558945H1
aaattagtgattcaattgaaattcgantttcctttttaatcacctggtnttntttntaaatttgaaggngatccaatccaaatggcatcgaatgccaatcacctgaaattccgccagatctctccctcttacacgctcttgataaaccgaaacgaancaatagctatagcatcanacacacacaccaccgctagggttagggttagggttgggggtgttccgaagtaacaacaatggcggtctccgacggcgtcgtgaagaaaatcgtcctctcctanacctacgncgcg

SEQ ID NO: 4060 - DNA, 293 bp, Glycine max
  unsure (1)..(293): unsure at all n locations; Clone ID: 700558946H1
acgaaatcttgaatcatctatntcaaaccaagaaaaagatattgaaaacgnttatgtnaggntcaganagtgaaaangnatagtaagggtataanggaanaagaaagacaagaacaagatggaggcagaacttaatttcttactaagaaattttttgattntacatttaaattggaataatttcttaggtcanagaatatttaacaatgtcaaagtatattgtctcctgattagattagaaaatttaagagaaattacaatagcctctattcanagaggagaactaggtctag

SEQ ID NO: 4061 - DNA, 296 bp, Glycine max
  unsure (1)..(296): unsure at all n locations; Clone ID: 700558947H1
gngcatacntagntatctagctagcaagtgggacaagngatatatntacgtggtaacncnagagtggccattctgtagtttatttctgntcaccaaggcttatcacatcacaatttgtgcattgcctcgtggtcctttttcttctttgcttgccaaaaatcttacacacacaggnatctatccaaatgggttctcaccagcaagaaccatggctattggagaatgggaaaccgagggtgttgaccaaggagaataggcatgggccgttctgcaacagncatgtcctccaacgtntt

SEQ ID NO: 4062 - DNA, 291 bp, Glycine max
  Clone ID: 700558948H1
atatagcccaagccctatacaaccaaaccctaacacacacccatttgattcagtttccatgggctagcctcaaggttgcatttttggctgcagtgctctgcatggttgtggtgagtgcacccatggcacatgcagctatcacgtgcgggcaggtgacgaatagcctgatcaattgcatcggttacctccagaacggaggaacgccgccgtcgggatgctgcaacggagtgaagagcctcaatgccgccgccaagaccaccgccgaccgccagacggcgtgcaattgcctca

SEQ ID NO: 4063 - DNA, 285 bp, Glycine max
  Clone ID: 700558950H1
cttgagaataaccaacaagagggaagatgggtatcatgatttggcatccctttttcatgtgataagtctaggtgacataattaagttctctttgtcaccttcaaaaaccaaggatagcctgtcaaccaacgtgtctggggtgccccttgatgatagaaatttgattattaaggcgcttaatctttacaggaagaagactggcagtgacaagtacttttggattcatcttgataaacgggtgcctactggggcagggcttggcggtggaagtagcaacgctgcaac

SEQ ID NO: 4064 - DNA, 288 bp, Glycine max
  unsure (1)..(288): unsure at all n locations; Clone ID: 700558952H1
ttcttattgagtttttgggcttctcanttctctctttctatctttctttcagacaangccanatatggancacgctctcaaangcagtgagttgatttttggtaacagagttcaattgaaatttgaaacatggattgggttcgaggagacgccctcgggcnaggaancttcgctaccgttagtttagcgattccgactacaaatccgaatcagttnccgtctctaaccgccgttaagtccgcggaggctcaaacctcgtgctggctaagaaacgagaaacacgtgctg

SEQ ID NO: 4065 - DNA, 288 bp, Glycine max
  unsure (1)..(288): unsure at all n locations; Clone ID: 700558953H1
ataattcttcantgntctcaattatcaatggctccccaaaccatttccatnctcaacctcttacnagaacctgatgncttcattcacacttcccatggaacacgcattccagcccacgcacccattctggcttctatgtccccggttctggagaacttgatagatcgcccacgtaagcatcggagctccgagagantaatccaaatccacggcgtcccctggcgacgctgtcaccgccttcgtccgattcctctactcctccaggtgtacggaggaagagnttgacca

SEQ ID NO: 4066 - DNA, 279 bp, Glycine max
  unsure (1)..(279): unsure at all n locations; Clone ID: 700558954H1
tttcgcgacttgaaggcanaattccagctctggaaacatctcatncgttggnnatatcctagagaaagtgtgtccaacccttcctaatggagccaaggttgtggttaacttcagtggccggggtgataaggatgttcaaactgctatcaagtgcttgaagctttgaaagggttgtcatgaacttgtgtggagctgtggattggctgctgactgagctttattttcatacttatgagacataattaatacaatttatcnttagaccaagttaaatnatca

SEQ ID NO: 4067 - DNA, 180 bp, Glycine max
  Clone ID: 700558957H1
cttatgggaagttatgaaaataggattggggcataagaaaaaaatggtgggtggtgaacaaagttgtggaacatgtccttcatgtttctgattgtaatatatattgccacaacattaatgtgaattgttggtttttcttcttgtacattcaaattatcttattttaagttatgaattctc

SEQ ID NO: 4068 - DNA, 286 bp, Glycine max
  Clone ID: 700558958H1
ggcttccctggcggcttccaccgcggctatgtcagaaatccttggaaaccccgttaacctcagatgcgcaatcaggtctgctccatcaccaactacacctgccaccttcaagaccgtcgcacttttctccaagaagaagccagctccacctccaaagaaaaagcctgccgctgtatcccccgccaatgaggaactcgccaagtggtatggtcctgacagaaggatcttcttgcctgagggtctcttggaccgatctgagatccccgagtacttgaccggagaagtg

SEQ ID NO: 4069 - DNA, 285 bp, Glycine max
  unsure (1)..(285): unsure at all n locations; Clone ID: 700558959H1
aaagccactagttctatggttaaatggagggcctggttgttcttctgttggagctggagctttctgttgagcatggccctttcaaaccaagtgaaaatggtcttttgaagantgaacatagttggaacaaagaggcaaatatgttgtacttggaatcaccagctggtgttggtttctcctactctgccaataaatctttctatgactttgtgaatgatgaaatgacagcaagggacaatcttgttttcctacagcgttggttcactaaattcccagagttaaaaa

SEQ ID NO: 4070 - DNA, 160 bp, Glycine max
  unsure (1)..(160): unsure at all n locations; Clone ID: 700558960H1
tatgtttggaggctctactcatttgcccagggtgatactcttcaaagatggaggactgaaccttttatcatgataacgggtagtggaagatggattccgccccaattaccaatgtcaaaaagtccagagcatgaaaaggagtctggttccacacannata

SEQ ID NO: 4071 - DNA, 290 bp, Glycine max
  unsure (1)..(290): unsure at all n locations; Clone ID: 700558961H1
ggcttccctgngcggcttccaccgcggctatgtcagaaatccttggaaaccccgttaaacctcagatgcgcaatcaggtctgctccatcaccaactacacctgccaccttcaagaccgtcgcacttttctccaagaagaagccagctccacctccaaagaaaaagcctgccgctgtatcccccgccaatgaggaactcgccaagtggtatggtcctgacagaaggatcttcttgcctgagggtctcttggaccgatctgagatccccgagtacttgaccggagaagtgcc

SEQ ID NO: 4072 - DNA, 286 bp, Glycine max
  unsure (1)..(286): unsure at all n locations; Clone ID: 700558963H1
cttctatttggtgttgctagaagatttgccaatataggtanaagatagttaaaaatagaggtggaagcagcattttcttgaatgccattcttttggacgatccacattaccctttgttgtagtcgcgttattattacctgatgaaaatttagaggctctattgtggacgaaataagttatcaattcaacaataaaccaatggaaatgagaaaatcccgggttggtggagggagtaggtgacgattttttttcttggaccattgtagttgttggtcagagactatag

SEQ ID NO: 4073 - DNA, 222 bp, Glycine max
  Clone ID: 700558964H1
gtaaaatatatattaccctcttttacactcctttgaagatgaacatacactgctactttcagctttaatgcattgcttcttttattgtcctgtatatcaaaaatcattggcatcttatgatcttatttgtcactgtgttatggtcatcaaattcatcagcagcagggttattgtattgtatatggataaagagaaatgctagtaacatgcacattccctcct

SEQ ID NO: 4074 - DNA, 244 bp, Glycine max
  unsure (1)..(244): unsure at all n locations; Clone ID: 700558966H1
canacatccaaagagtaatgtgcatgcatgcccatcacagaaagtaatttggttgggcatctccacctatctgaaacatggataaactaatgagcttcaagatttaagggacttgtaatcgttatacgaagagtgtgaaactccagaaagggaatttgtggtcggtatttagctgtatgggtttaaatttgctttagaaaaatgtttagagaactttaaaaaaaanaaaaaaagagaagaagag

SEQ ID NO: 4075 - DNA, 282 bp, Glycine max
  unsure (1)..(282): unsure at all n locations; Clone ID: 700558967H1
cttagctatagtccaatcatgctntctactctctttnctctttantttaantgnantttgtgtatatatnaaggcggcncanacccaagtgggggtaagtcagtcttgggantgagtcactctngcttgcntaacccngatctgcaganaatntgcgaagaactgggctgttacatttgttatgccttgtcattgcgttagtaagtgtgcaagcagaggangcgtataagtattacacatggacgtgacttatggtaantatntctccattgggtngtcncc

SEQ ID NO: 4076 - DNA, 285 bp, Glycine max
  unsure (1)..(285): unsure at all n locations; Clone ID: 700558968H1
caaaanctcatccatggcttctcttctccgcttcaacggcgtctcnctactttcccttnnnnncccanacccacacgtganccnatcctccccanaccgtcactcctcgtaacggtgcgcgcggangtgaaanaganctccgcacccgcngccgccacatcctccnacgnaaagatccgcgnaatcctccgcaaccgtgactacgacaagaaattcgggttcagcgtggagatcgagtncttgacgntccnaaaanggctctcaaaagaaanattngtctgatct

SEQ ID NO: 4077 - DNA, 283 bp, Glycine max
  unsure (1)..(283): unsure at all n locations; Clone ID: 700558970H1
gcttcgcgtggaccancaagaagtgtaagttttcattcaatggccagcgcttccgtctcagcaatatctncgtgngtgctctacggcgtcgtttgaagggcttcgaccttcggctgttcagtttgcttccgcgggcagaattagaattggcaatctctcccaaaggtctttccggggcttggttgtcaaagccgccaccgttgttgcccccaaatacaccgcgattaagcctctgggagacagagtgctgataaaaataaggaagcagaggagaaaatgaggg

SEQ ID NO: 4078 - DNA, 285 bp, Glycine max
  unsure (1)..(285): unsure at all n locations; Clone ID: 700558971H1
caatgatttcacaacttgcttcctctggcaaagtgaacaagatgtttgctgcattgcngaaatggngtaaatggangtggtatatttgctattgngcatgttgtgcaanctaaagtgaacntgactccattattaccagaccagccacactacagtgtcaatatgactgcagttcaagttggccatactttccttagtctatcaacagatacatcagcacaaggagacaganaagggacaataattgacagtggtacaaccctggcctatctgcctgaaggattt

SEQ ID NO: 4079 - DNA, 286 bp, Glycine max
  unsure (1)..(286): unsure at all n locations; Clone ID: 700558972H1
ctctctctcctgtatttgtcttgattccgatgcgaatggtaattncagaaaccccaaaccctcctttcctctccctcctcctagatcgagtcagaatcatggccaaagctgaaggtggcaaggaaccaataaatgaacaagcagtagcaaatatgtatgctgcaatgaggtctgagctcaaccaaatttactccaaaataactgaactggagatggaagttagtgagcacacattggntaccaatgccattcaaccacttgaccaatctagacgatgctatcgtat

SEQ ID NO: 4080 - DNA, 200 bp, Glycine max
  Clone ID: 700558974H1
ttattttggggtgttggtgggagttggtctcaatggaggcttcaacaagggaatttactccaagcctgcctttgccaatctcaacaacaatattaatctcaatatcaatcctaagggacacaagggcaaggttgaagatgagctttttcacccatccaaatcttccaagaaaaacaacaacctcaacaaaaaacatgggg

SEQ ID NO: 4081 - DNA, 283 bp, Glycine max
  unsure (1)..(283): unsure at all n locations; Clone ID: 700558975H1
cacagctcttactttcttccgccatattccacaagaactctccaangatcctcctgtcccangagattctttggtgggaaaaatccaagaggtttnaaatttgaaggcagggaagatggattatttcaatgcaccaggaagaaaccatctctttgttccagggccggttaacattccggaccagatcatccgggccatgaacagaaacaatgaggactaccgttctccagcaattccagctatgacaaaaatttgcttgaggatgtcaagaagattttcaaga

SEQ ID NO: 4082 - DNA, 284 bp, Glycine max
  unsure (1)..(284): unsure at all n locations; Clone ID: 700558976H1
ggaacagcatccgtggttcttgctggacttgttgcagctctgaagttggttgggggtaacttaggctgattcacagattcttatnccttggtgctggagaggctggcactggcatagcagaactcatagcacttgaaacatcaaaacagacaaatgctccactggaggaagtgcgcaagaatatttggttggtggactcaaagggattgattgtcagttcccgcaaagattcgctccaacattttaagaagccctgggctcatgagcatgaacctgttagaaat

SEQ ID NO: 4083 - DNA, 284 bp, Glycine max
  unsure (1)..(284): unsure at all n locations; Clone ID: 700558979H1
cggtccggcaacgttgtttgggaggtttccgagaaagtggattgtttngctgacgtggcggtttgtgatncgctgtcggttatatttaaggttggggtgaattcgggggaggcatcctacgtggacttgaggaatttgagtagcggtgagagcgcgtgggtatgtctcggagataaaagaaaaattttgaatgggaagaaggaagggtttggttgcaagattgaaacgcaggggaatcaagtgttttgcaccaagggtggtgatatggagttgtggtcggaggt

SEQ ID NO: 4084 - DNA, 287 bp, Glycine max
  unsure (1)..(287): unsure at all n locations; Clone ID: 700558980H1
atttcattacttctaccaagctactacatttttaacttcctctttctacatttcattcanaacaatcatgggcttctcttcattccattacattttcaacaaaaactgtcctttatgtatttgtattggcctcttccatcgcagcctctgctggcaacttctaccaggattttgacgtaacttggggagatggtcgtgccaagatactcaacaacggcgatcttctcactctttcccttgacaaagcctctggctcggggtttcagtccaaaaacgagtatctcttt

SEQ ID NO: 4085 - DNA, 282 bp, Glycine max
  Clone ID: 700558981H1
gagagattctctatccctcgaattccagcagtggttgagctctgcattcaagccggtgttgaaattccagagtttcccaccaaaaggagaagaaagcctatcatccgtattgggaggaaggaattcatcgatgctgatgaaagtgacctaccagataaaatctcagagggtcctttaaaaccattactagctgaaatacatgattcagaaatagtagctccattagacaatgaagtagcccctcttgccgaggaaactctccaagcatgggaacggatgagg

SEQ ID NO: 4086 - DNA, 279 bp, Glycine max
  unsure (1)..(279): unsure at all n locations; Clone ID: 700558982H1
cggtcaatgtgcnnttggtttgcttgaccttgtgtatcaaccaaatctagagcaacccatttntctnttctcccatttgaaggaaangaaaacttacacctctctctctctcnaactgattcgctccaattccgccgcgcccagattcttctctctcacctacaaacccggtcncaacaaggtctttccttccnactcctatggcggnagaaacatcttggatcagccatatgatgacagacaaagggagactggggcgtttgattcattttagaattg

SEQ ID NO: 4087 - DNA, 284 bp, Glycine max
  unsure (1)..(284): unsure at all n locations; Clone ID: 700558983H1
gctttcttgttttgctattgcttgctccgcaatcataatttcatcatcgaatcaaatncaattttgaaggttcattataatggcggaagagataaccaagaacgacgtcggagtaacctccaaaaccaccagaagcagctccaggttctggcctcgttggattcccacttccaccgatcacatcatcnctgccgagaagcgccttctttccgtcgtcaagactggttatggttcaagagcatgttaacattggctctggtcctcctgggctccaaagtgaggtg

SEQ ID NO: 4088 - DNA, 284 bp, Glycine max
  Clone ID: 700558985H1
gtagatatgaagatacaaaatgctaaggacattcctgtgcaaaagatttctgcaagagatcaaatagagcatccttactgctcaagcatggctcatggaaaataaacaactagaacaaaaggttgcaaaactgagcctgcagactggctttacgtctgagtatacacgaatgatgatacatgagactgatcatctaaagaaagtcaaggaatcatctggaccgaaagaagcgtcaaaaaagagcaatcctctattcgaggcacccgtccaaggccagagaatga

SEQ ID NO: 4089 - DNA, 282 bp, Glycine max
  unsure (1)..(282): unsure at all n locations; Clone ID: 700558987H1
gtttctattcctcactaggagctcctntccactggttcttcatctgcatgcacacagttgcntagttttggaaaccaagaattcctgaagaagggtagcatcaacaagcagttctgaaaatggagatcaccaatgtcagtgagtatgaggctattgcaaagcagaagttgccaaagatggcgtttgactactacgcatctggtgcagaggaccagtggactctgcaagagaacagaaatgccttttccagaattttgtttcggncacgtattcttattgatg

SEQ ID NO: 4090 - DNA, 212 bp, Glycine max
  unsure (1)..(212): unsure at all n locations; Clone ID: 700558988H1
tgattnaagaagatgccgatcagaaacatcgccatcggaaggcctgaagaggctactcaccccgacacgttgaaggcggggttggctgagttcatctccaccttgatcttcgtgttcgccggttcaggttccggcatcgcctacaacaagctcaccgacaacggcgccgccactcccgccggcctcatctccgcttccatcgcccatgcttt

SEQ ID NO: 4091 - DNA, 281 bp, Glycine max
  unsure (1)..(281): unsure at all n locations; Clone ID: 700558991H1
ggtggtgcctctcttccatctccccagccaaanncctctctcaagaaggccacattagggcccttctgtcttcgcaaccgttagcannnnnnnnnnnnnnnnnnnnnnnnnnnnnnnnnnnnnnnnnnnnctcattcaagacaggcctgtctttgctgcccctgcccccatcatcaccccaactgtgagagaggatatggcaaaggaatacgagcaagctattgaagaactccagaaatgttgagggagaagagtgaactcaaagccacagctgctgagaa

SEQ ID NO: 4092 - DNA, 280 bp, Glycine max
  Clone ID: 700558992H1
gcaagctagggagtaagagatggatttggaccagtggatctccaaggtgaaggatggccagcaccttctcgaagaggagcttcaacttctttgcgaatatgttaaagagatccttattgaggagtcaaatgtgcagcctgtcaacagtccagtgacggtttgtggtgatattcatggtcagtttcatgatctaatgaaacttttccagactgggggtcatgtgccggagacaattacatttttatgggagactttgttgatcggggttacaatagtcttg

SEQ ID NO: 4093 - DNA, 280 bp, Glycine max
  Clone ID: 700558993H1
tgctgttcttacacgtgttgtggatagcatgactgacaacttgagaccaactcgtgctgaagcaacagatgtcgccaatgctgttttagatggaagtgatgccattcttctgggtgctgagactttacgtgggttgtaccctattgagactatatctactgttggcagaatttgttcagaggctgagaaagttttcaatcaagacctttattttaaaaggacagtcaagtatgttggagaacccatgactcactggaatctattgcatcctctgcggtac

SEQ ID NO: 4094 - DNA, 285 bp, Glycine max
  unsure (1)..(285): unsure at all n locations; Clone ID: 700558995H1
ggagttcgcaaggttgctttaacttatctgtcttnttccttggcgttagancttacacttggccgtgcaatattgataatacattcagttatttctagaatttctttacttatacaatttatcgttttaggtatctgagaatagttgaagagcttcaaagagtggaaatatcggattcgtctagagaagnnaagcttgcgttctttattaatctttataatatgatggccatccatgcaatcttagtancaggccatccagatggagcactggaaagaaggaaat

SEQ ID NO: 4095 - DNA, 283 bp, Glycine max
  Clone ID: 700558996H1
ggagttcgcaaggttgctttaacttatctgtctttttccttgcgttagaacttacacttgccgtggcaatattgataatacattcagttatttctagaatttctttacttatacaatttatcgttttaggtatctgagaatagttgaagagcttcaaagagtggaaatatcggattcgtctagagaagagaagcttgcgttctttattaatctttataatatgatggccatccatgcaatcttagtatgggccatccagatggagcactggaaagaaggaaat

SEQ ID NO: 4096 - DNA, 283 bp, Glycine max
  unsure (1)..(283): unsure at all n locations; Clone ID: 700559001H1
tgagaacgaaaaaaganaaanaanaaccctaacgcactcgngaccctgagatttttcatctnngtttctcattcnctttttnatcatggacgtcgaggtgcggcagatcttcaacaagttcgacaagaacggcnacggaaaaatctcggtaacggagctgaaggacatgctcgcggccctcggatccaaaacgacggacgaggagtngaaacgnatgatngagganctcgnccanaacggcgacggtttcatnntntcnangattcgnggatttnatgcaatg

SEQ ID NO: 4097 - DNA, 280 bp, Glycine max
  unsure (1)..(280): unsure at all n locations; Clone ID: 700559003H1
gacttgttgttacagaaatgccagaggtggagcaaacagctagagaacaagccactgataatgctatcttagatcaggttnctaagattgtacaagttgatatacctcaatccttgtttgaggaacaaggaaggcagctttatggagccaacctattagaaatacaggcaaaaatgaaactaaatgagcagcagctggcgactctgtcaagttcaaaggctgtgaacgaattncttgagcatcaganggaaaatataacaatttgataaacagagtctgg

SEQ ID NO: 4098 - DNA, 276 bp, Glycine max
  unsure (1)..(276): unsure at all n locations; Clone ID: 700559010H1
cttggttctgaatctgtctacntgtgcaaatcattctgtanttgttggatactgtataatnnataanagagaantgtggccctacctatttgaattcaggnacaatttattgacaactttagatttgatacctgtgtnagttgtttnaatgaagtttactaactggngtctgtttctcaaatgttcccctattctcctcanagacnccattctattgatacggtcacttcaaatatcacatctntgnatgggcaactatngattatgttcacaatg

SEQ ID NO: 4099 - DNA, 277 bp, Glycine max
  unsure (1)..(277): unsure at all n locations; Clone ID: 700559012H1
gcaacacgtttagtgcactgcgagctgcggtcggcgaggcccgcggttcgggcgagggaaccggccggtnccggttcaggttacgatcccgaaacccaaagcggcggaggcggaaggcgcgaacatcgttttgcagccgcggttgtncactctgagatcctacggttcggatcgagcgggggttctgatcaaggcccgcaaggagggtgacgatgatgacgtgtcccccttcttcnccgctctttccgactatattgagagctctagaaaagtcatg

SEQ ID NO: 4100 - DNA, 278 bp, Glycine max
  Clone ID: 700559013H1
tggcaaacatgattgtggcttccaccaaacctctggttccagtctgcaccagttcccgttcccccacacccaaagtccccattctgccaaatttcactccccaaagccccaaccttgaaactgaaactcccgatttcaaagccccagatgctgtccctccttggagggatagcaccactggtcttggccagaccctccctcgcagaagaaattgagaaagcagcactctttgacttcaacctcacccttcccataataatggtggagttctgctgctg

SEQ ID NO: 4101 - DNA, 277 bp, Glycine max
  unsure (1)..(277): unsure at all n locations; Clone ID: 700559014H1
ctcagccttcttcttcgctctctcgctctgactgccgccgccgtgcgttcgtctctcctctggcgttgacttttgttttttgcctgtnagagagtaaggcaatggancaacgacccaccgaagcngtcgaatcgtngtcngtctccgaccctgcagatcccccaatcatccaatcccagtccaactcatcttttgantgccggaagagaaattcnaaattgngngaagcntcgganaagaatncttcaggaagangacctccttaactctcaccaaa

SEQ ID NO: 4102 - DNA, 281 bp, Glycine max
  Clone ID: 700559015H1
gaatgagtggcggaggagaagagggagcaactctggagttcactccgacgtgggttgtggccgccttttgcacagtgcatcgtcgccatttccctcgccgctgagcgcctccttcattatggcggaaagtttctcaaagccaaggaccagaagccgctctacgaagctctccagaagatcaaagaagagctgatgcttttggggttcatttccctgcttttgacggttacacaaaacggcattaccaaaatctgcgttcgaccctctttgacgctccacat

SEQ ID NO: 4103 - DNA, 281 bp, Glycine max
  unsure (1)..(281): unsure at all n locations; Clone ID: 700559016H1
agaagaacaagtagttgagaactaagaaggagaagcaaatggcttcctcaatgatctcttccccagctgttaccactgtcaaccgtgccggtgccggcatggttgctccattcactggcctcaagtccatggctggncttccccaccagaaagaccaacaatgacattacctccattgctagcaacggtggaagagtgcaatgcatgcaggtgtggccaccagttggcaagaagaagtttgagactctttcctacctgccagaccttgatgtgcacantgg

SEQ ID NO: 4104 - DNA, 285 bp, Glycine max
  unsure (1)..(285): unsure at all n locations; Clone ID: 700559017H1
ccgcactagaagaaaccttgcagattgtgctgttgtggtggaagaactctggtggaaggcattagactttgcttctncttaaacggagctctgtttcattcnttgatgtggagaaacacgaaaccgccgtgtcacggtggacaagagcaaagacaagagcagctaaggttggaaaaggtttgtctaaggatgataaggcacaaaaattggccntatcaacattggctcgaagctattgacccacgtcatcgctattggnacaatttgcacatgattacgatactt

SEQ ID NO: 4105 - DNA, 283 bp, Glycine max
  Clone ID: 700559018H1
gttggaaagtggaaatgcaggagagccagcaaaactgatcaggcagagataccgtgaagccgcagacttgatcaagaagggaaagatgtgtgctctcttcatcaacgatcttgatgcaggagctggtacgtcttggtggaaccacccaatacactgtcaacaaccagatggtgaatgccaccctgcatgaacattgctgataaccccaccaatgtgcagcttcctggtatgtataacaaggaagagaatccccgtgtgcccatcatcgtcacggtaagatttc

SEQ ID NO: 4106 - DNA, 280 bp, Glycine max
  Clone ID: 700559020H1
ccacattctcaaccccgaaccctaagagcagagcgcaaatgacaaccaccttcgcgaccgtgcgcaggactcggtggcgcattactgtcatccacctcatctcgtctcacctcagggtttgtgaaatccccagtgattgctaggaatcccttgaggcaagctgtggcaatgggaaatgggaggattacatggtaattttagtacaagattaataatttgtctgattttgaaattggaaaaaataactgaatgatgatgatgttgtatattgatatgatac

SEQ ID NO: 4107 - DNA, 282 bp, Glycine max
  unsure (1)..(282): unsure at all n locations; Clone ID: 700559022H1
gttccaaaccctaaacgctangagtttaattttctggttgtnctcttgttcaatgcggtgnttgcctccggcggcgcgtgggagtntctgtggcgcgtgatgcctagttccccgcntacctatgcttcacncgacccgcattgtagagttcacgccggagagacggcggaatctcaccggacgatcgtgatttcgcancttcatggcttccgcctaccggnacgaanctaattggccanggcatagaagcggtggngctggattcaggggaaaagtaccttt

SEQ ID NO: 4108 - DNA, 278 bp, Glycine max
  Clone ID: 700559023H1
gtgacagagtaaaggaggcataccgatgacgatggcgatgacggcgtcgcagttgcggtgcggttgggggtggaggccaacgccgaatcagcagcagcaacgacgtcgtatggttccggtggtgtgttccatcgctatagagaacgcgaagaacaaagagagagcgaaactgaagaagctcttcgatgaagcgtacgagaggtgccgcactgctcccaccgaagcgtttccttcatctccaacaattcaccgacgctctcgacaagtacgacttcaac

SEQ ID NO: 4109 - DNA, 254 bp, Glycine max
  unsure (1)..(254): unsure at all n locations; Clone ID: 700559025H1
ttctattcattcaagattcancaagtgcgttttggaagcagagaccgaaatacttcgagatggcccgtacaaagcaaactgctcgtaagtcaactggaggaaaagctcccaggaagcagcttgcaaccaaggctgcacgtaagtctgcaccaacaactggtggtgtgaagaagcctcatcgttatcgccctggaactgttgctcttcgtgagattaggaaataccagaagagcactgagctccaatcaggaagc

SEQ ID NO: 4110 - DNA, 278 bp, Glycine max
  unsure (1)..(278): unsure at all n locations; Clone ID: 700559026H1
gaatcacggagcttcctgattctgttggaaatctccttagtctggtttatccttgatctgaggggaaatcagttaacactattgcctgcttcttttagcaggttggtgcgtctagaggagcttgatttgagttcaaatcagctttcagcacttcctgatactatagggtcgcttgttaggcttaaaatattgaatgtggaaacaaatgatatagaggaacttccacattctgttggtagttgttcttcccttagggagcttcgcatngactataaccg

SEQ ID NO: 4111 - DNA, 278 bp, Glycine max
  unsure (1)..(278): unsure at all n locations; Clone ID: 700559027H1
ctctgtcttataactttacctgtctatcctcatggagtagtaaagaagtaactaatcaaccacaaacctaaacaaccccttttgcctaaagctccttccttttctccaatggcaacctgggttttatcagaatgtggcttaaggcctcttccaccagtgtttccacggtcaacaagacccatttcgtgccaaaaaccttcaaagtctagatttttaagcacaaacaagggtgtgccagatctgaatctccaagcaagagggttaacngctgtagtttt

SEQ ID NO: 4112 - DNA, 281 bp, Glycine max
  unsure (1)..(281): unsure at all n locations; Clone ID: 700559028H1
attgaaagccatggatgttgacagacaacaactaagaagtgcaaacaacaatgcttcgagataccattgaagatttaaggcgttcattgcaacctaaagagagtgctattgnaggcattgcaanaatcagttgtagaaaaggaacagatgttggaanatatgaganggttgcttcaggctnctgangaaaaaaggcaagcggcactagctggagctactcagctgaaacatcaaaagaatatacagagtttggaggctcaacttaatgatgattgtctgac

SEQ ID NO: 4113 - DNA, 278 bp, Glycine max
  unsure (1)..(278): unsure at all n locations; Clone ID: 700559029H1
cgntgccttttcacgccacttgtgactnttccattccnancagaatcaccttnnctatnnttttagncactgctaaaacttgtancttttcntttccccccgnaaaaaataaantaaaataaaatccaacacatttancagatttcacgccaccaacggtgtcttcgtaacggatatagcataaccttttgatcattcggtatgaaaatccaatntccaacctcggatccatcttttacattcttcagatcataggatctaatattgttgcagttttg

SEQ ID NO: 4114 - DNA, 276 bp, Glycine max
  Clone ID: 700559030H1
caactttgtgatgagtcacttggatgcagccacacaagatgaagaagggtctgcacctgttttgtttcacccatttgggagctacctttttgtttcatcagatggagcagtgtgtgtggattgtgcaacttctgttataaagatgttgcatttgatgtttgcatcagtttccccagcttgtagtattgaggaccatctaaagtatggagactatgttaagaatttgtcattacaattcttgaaccagaacaattccgtgcaggggatattcctgat

SEQ ID NO: 4115 - DNA, 278 bp, Glycine max
  unsure (1)..(278): unsure at all n locations; Clone ID: 700559032H1
gcttatccttattgagagaaaaatggccaaatcaatcnnattctttgagttgaacacaggggccaanattccttctcttgggttagggacttggcaagctgaacctggtgttgtagctgaagctctcaccacagccattcaggttggatacaggcatattgactgtgctagtgcgtataagaatcaagcagagattggttctgctcttaagaagctttttgatgatggtgtggtgaagcgtgaggacttatggatcacttccaaactcggtgttcaga

SEQ ID NO: 4116 - DNA, 280 bp, Glycine max
  unsure (1)..(280): unsure at all n locations; Clone ID: 700559034H1
ttcactgcacttcaggtgcgttccaatcaaagccatggctgaagttgatactatagcattgtcaaaaactgnttcttcttctgctccgggcagcaagcaagcnttgatatcattgtcagacaagaaggatcttgcatttgttgggaatgggctccaggaattaggatactattgtttcaactggaggaacagcttgacgcattggagagtgctggagtagctgttactaaagttgaaaagctcactaagttccctgaaatncttgatggcgtgtcaaaac

SEQ ID NO: 4117 - DNA, 282 bp, Glycine max
  Clone ID: 700559035H1
tggcaagagtggtggcactccaacagaaccaactatgctttctctaccttagcttcctctgctttctgacttcagtggaaccagacttcaaactcaacttcagttcaagagaaagcaatgccatccaaaagggtctttctacgtctccgcatcgagcaccaagaaaatcctaataatgggaggcaccaggtttattggtgtgtttttgtctaggctccttgtcaaagagggtcaccaggtgactttattcacaagaggtaaagcgcctgtcctcaacagttg

SEQ ID NO: 4118 - DNA, 280 bp, Glycine max
  unsure (1)..(280): unsure at all n locations; Clone ID: 700559036H1
aganaagncaacaagagcctcacaanagacaaaaccttgaganagaggttgtccanttgcaagcacacttgaaatgtgaagaggcgctcaatagggtcttacgttgtgcacttcatggaccagttttctctcttccantcattcncccaccacantccacctcaggttcgtgnnattcttgaagaattggcaatggttgaggaagagatcatcaagcttgaaaaaaaagttaaggaactggaacttaggattgttccaggagagataccgancatagact

SEQ ID NO: 4119 - DNA, 277 bp, Glycine max
  unsure (1)..(277): unsure at all n locations; Clone ID: 700559037H1
atttatcctgagggaaattgaggggcagggtgataataacagtaacagggatgagtgatatcatttcatttcagagggattaattattgttttattnttaagtgtggagtgctgtgcaggtcaaggcccttttacttgttcgtccggttgttcccatcttctctctcgtaccaatcaaatcacacttttgtgttgtgttgggaaaccctaaaccccgttttcggtgagatcgagatcgatcgaacatggatgaggagtacgatgtgatcgtgttggg

SEQ ID NO: 4120 - DNA, 278 bp, Glycine max
  Clone ID: 700559038H1
tagaaggggggatgctagtcacataaataggtcaaagagatatcctgaaaatgctaaacctaggtggaagtcctttatgaagataataccggaagtaaagccggacttgtccaaagagccggttcagaatctgctttcagctttagcagatctccaaaggcgagttgacaaggctgatgcaattgtgaagcaaaaggaagacgaaaataccgaattgagggaacagctaaaacaatctgagaggaagaggatcgaatatgagacaaaatgaaatcaat

SEQ ID NO: 4121 - DNA, 277 bp, Glycine max
  unsure (1)..(277): unsure at all n locations; Clone ID: 700559039H1
tacaattcttctaagctctactaaaaaaagatacatagaaacaatcgaaattatttattattattaaagcaacatgnttttntgcatggacaaaagggagagtgttccggcgtgccagaaagggtaaggagttgaaatattctggtggcgacatggagatagagattgccatccccacccacttccggtgcccggtaaccttggacatgatgaaggaccccgtgaccgtttccacgggcataacctatgaccgcgacagnatcgagagtggatcgag

SEQ ID NO: 4122 - DNA, 276 bp, Glycine max
  Clone ID: 700559040H1
atgcaacagaggagtatgcagggatttcctggtattgactgtgagcctaatctatcgaatcagcacaatgtactgggatgacaagtatggaacccaaagtgtgtccaatgaggtagttagtgaaatgagagaattctcagcaaggacaatcagaatttgacctcaaattctttcttattagatgatgatctgagtctggtgtagcggaactggagaaatggatagtcaatgcaacagaggagtatgcagggacatcctggcatgactgaattatat

SEQ ID NO: 4123 - DNA, 274 bp, Glycine max
  unsure (1)..(274): unsure at all n locations; Clone ID: 700559042H1
gattctaccaatgtcacttncgggcgtcgctttgatgtctacctggaccatcctttctttgagcatcagattcattggttctccatntttaactctttcatgatggtcatcttccttactggtttggtgtcaatgatattgatgcgaactctgagaaatgactatgcaaagtatgctcgggaagatgatgatttggaaagtctggagagagatgttagtgaagnatctggctggaaacttgtgcatggtgatgtttntcggcccctcgcaactt

SEQ ID NO: 4124 - DNA, 277 bp, Glycine max
  unsure (1)..(277): unsure at all n locations; Clone ID: 700559044H1
cccgngatttcattgctgcgaaccaaggagaccgtgccactaacgtaatcaggggcacaaagaaagaacaagttcaacaaatgcatcaaagacattaaggagttcaaaganagcactaaggttgacaaggtggttgtcctgtggacagccaacacagagaggtacagcaacgtagttgtgggactaaacgacaccatggaaaacctctttgnttccttggacaggaatgaggctgagatttccccttccaccttgtatgcnattgctgtgttatgga

SEQ ID NO: 4125 - DNA, 272 bp, Glycine max
  Clone ID: 700559045H1
catatctcatttatagttcactattgaaagatgggtttgaaaatggcaatactgatcctaggcctgctggccatgttccttttggtctcctcagaggtggcatccacgaattcaaaagaggtgacaaatggagttgaagatgccaaatatcctggtggaggctatggtgggggttacccaggcaatggcggtggtggctatcctggccgtggtggtggctaccctggtcgtggtggtggctatccaggtcgcggtggtggtaccctggtcgt

SEQ ID NO: 4126 - DNA, 273 bp, Glycine max
  unsure (1)..(273): unsure at all n locations; Clone ID: 700559046H1
ataaagtcttcanaagtngctttccccttccacctttntttccaacgttcanaaaggaaggttggtatnaaaatggaaagcaaccatagcatgaggcaaaacaccatggaaacagagtttgaggacttgctgcnagtgatggcagaaaagctggatgtggagtcctttgtctctgaactatgtggaggtttcaagcttctatcggacccggaaactggtttgatcacgagcgagagtctaaggacaaattcagtcttctgggatggaagggat

SEQ ID NO: 4127 - DNA, 279 bp, Glycine max
  unsure (1)..(279): unsure at all n locations; Clone ID: 700559047H1
cacagtcacatanacatactactactcgtttcatttggcctcttgtagtagccaataggccatggttttccaaacaagcaataatcnccatttcgtattgtttcccctaatggctcaaggccacatcatccccatgatggacattgcaagactattggcgcggcgtggtgtgattgttaccatattcactaccccaaagaatgcatcacgtttcaattctgttctttctcgtgctgtttcatcaggcctccaaatccggctagttcaatcnactttcca

SEQ ID NO: 4128 - DNA, 280 bp, Glycine max
  unsure (1)..(280): unsure at all n locations; Clone ID: 700559048H1
gtgangnaganctgaagangaaggtagcagaatggttganagggaaganttatctggtagtgcttgatgacatctggggaaancaaagtatgggatgaggttaaaggagcctttccagatgaccanataggtagtaganttctcataanaagtcgcaacaaagaggtggcacactatgctggaactgcgtctccctacnaccttcccatcctcaatgaagatgaaagctgggaactcttcacaaagaagatttttcgaggtgaagaatnccgtctgattt

SEQ ID NO: 4129 - DNA, 277 bp, Glycine max
  unsure (1)..(277): unsure at all n locations; Clone ID: 700559051H1
cttctctcggcgtcgccatggacgaagaagaggtgcgcaagatcttcagcaagttcgacaagaacggcgacggcaagatctcgtgcgcggantgaaggagatgatggcggcgctgggatccaaaacgacgtcggacgaggtgaagcgcatgatggcggagtggaccggaacggcgacggctacattcatttgaaggagttcggcgagttccactgcggcggcggtggcgacgggagggagctccgggaggcgttcgagctgtacgnctggacaagaa

SEQ ID NO: 4130 - DNA, 277 bp, Glycine max
  Clone ID: 700559052H1
gtcttcattctgaattgtctggtgattttagaaatgctgtaattctctggacctacgatcctccagaaaggcatgcgagactagcaaaggatgcattgaaggctaagaaggggattaaacaccttcaggttctggttgaaatagcatgtgcatcaactcctaaccatttggtggctgtgaggcaggcttactgctctctctttgattgctcacttgaggaggacatcatagcctctgttgctccagccctcagaaagcttttagtggcctagtaagc

SEQ ID NO: 4131 - DNA, 248 bp, Glycine max
  unsure (1)..(248): unsure at all n locations; Clone ID: 700559053H1
gatatgggttcgaagatgtatgcgctattgatgtgcggtgaggattcggagtacttggtgaagatncacggaggcacctatggggtattcatgaagttgctaccaagagcaagaggaaaagtgggacctnctacaagctcgtgccaaggagagttcccggagcaggcatgacttgncctctantnacgatgngctttgtcatacagtggaagctgctatgatgncacatggccaatgacccatggatc

SEQ ID NO: 4132 - DNA, 276 bp, Glycine max
  Clone ID: 700559054H1
cttaacgagaggattctttcatccatttccaggagacacgttgctgcacacccgtggcacgatcttgagataggacccgaagctccaaagatcttcaactgtgtggtcgaaatagggaaaggaagcaaggtgaaatatgaacttgacaaaagaactggacttattatggttgatcgtatactttactcatcagttgtttatcctcacaactatgggtttattccacgtactatttgtgaggacggtgatcccatggatgtcttggtattatgcagg

SEQ ID NO: 4133 - DNA, 269 bp, Glycine max
  unsure (1)..(269): unsure at all n locations; Clone ID: 700559055H1
cataaatttcgcggtcagcattttctgctacggttttgcattcctanncttgnactntaggtctcattgttgnatttnncattttcagctttcaccacaaccctttgnanctctgcatcctntaatgggtctctccacaacatttatacncccttcatccccaanattgaacctttactccnaaattcgaaganccttttancctcactntgtcagattncttaaccccctaaagattcgggcttcaactactctggntattnnaacgt

SEQ ID NO: 4134 - DNA, 269 bp, Glycine max
  unsure (1)..(269): unsure at all n locations; Clone ID: 700559057H1
cttaaattcgttggaagtgaattctctgtggttctattttaatttnagttatttaaaagttttggttaatgttnttgttcaattagtngttatgactgnttgggctntnattaaacctttatgaatactgtttcgctttggattacttattatnctttcgctttaaatntatngtnagtttggtttaaaaaaaaacnnaaacaaaancnggnngncccnggncnagtgcnncngacnncccgggannnaancnggaccgagcaccaagg

SEQ ID NO: 4135 - DNA, 277 bp, Glycine max
  unsure (1)..(277): unsure at all n locations; Clone ID: 700559058H1
ccaaagcaatggcttcccttgcagcatccactgctgctgcttcccttggcatgtgcagaaatgcttggaaaccccatcaacttcagtggtgccacaaggccagctccatctgcttctagtcctgcctccttcaagactgtggctcttttctccaaaaagaaggctacaccaacacctccaaaaaaannnnnnnnnnnnnnnnnnnncaatgatgagcttgccaagtggtatggtcctgacagaaggatcttcttgcctgagggtccttggaccgatc

SEQ ID NO: 4136 - DNA, 276 bp, Glycine max
  unsure (1)..(276): unsure at all n locations; Clone ID: 700559059H1
acaaaacgtacatccaagccaaccgagtttgccttttctacggtctcgtccttcttcttaaactacgagttgcattcaacaacctcttccacgaatttcttttctctcgacgagggtaaactcgtaatgttcgtttcgattttttccaaaagcgcctgcntttcttcccgagcgaaatcttcttttcttccacgaaccttggattcatttcagtagcatctttcagggtttatattccattgaattttacaactttntattttggtaattccatta

SEQ ID NO: 4137 - DNA, 277 bp, Glycine max
  unsure (1)..(277): unsure at all n locations; Clone ID: 700559060H1
tcatgntgtgcagttgtgtgagcaaggagccaagaggttcanagatganaatnttttatggtggccaagttcttgtcttggatgatattcaaggctganaaagccaagganatcatgtcttttgccggcaaaggaatgtctcaaaaccagaacgactgtgcttacactttccntgctacaacttctggctantcccagtagaccattcccttttcttatgaatatcattccaaccactgccaacaattcggttcaagaccancctgaaacaccatcc

SEQ ID NO: 4138 - DNA, 277 bp, Glycine max
  Clone ID: 700559064H1
cctcggtgaggtcactgacccaatctacccaggtggcagcttcgacccattgggccttgctgatgacccagaggcttttgctgagcttaaggtgaaggaactcaagaacggacgattggccatgttctctatgtttggcttctttgttcaggccattgtcaccggaaagggtccattggagaacctcgccgatcaccttgctgaccctgtcaacaacaacgcctgggcctatgccaccaacttcgtccccggaaagtgagcgtcaagaacgaaatga

SEQ ID NO: 4139 - DNA, 270 bp, Glycine max
  unsure (1)..(270): unsure at all n locations; Clone ID: 700559066H1
aatctttcaagttctagcaatcctcatattataaatagagctgattgaatcacaccccatatccaatcgaaaaaaattgataacatcacacagcattagtatgtatcagcaacaagggtcagatccaacaaagcaatcaccggcaaccggttttccggtgagctatagcaattcaacaacgtatttgaccaacgaggcttcctacgctccagtcccacctccccagcccaaacctcttgtcgnttggtccaccggcctcgtgactgcttc

SEQ ID NO: 4140 - DNA, 279 bp, Glycine max
  unsure (1)..(279): unsure at all n locations; Clone ID: 700559067H1
gtaatggcagcgtcactacaagcagcagctactttcatggcaacccaccaagttgagcaggagcaacactttggcagcaaaagtctantcagtccatttccaaggcttttggtttggaacctgttggagctaaaaaggtcacatgctcccttcaggctgatcttaagganttggctcacaagtgtgttgatgctaccaaaattgcaggattcgcccttgccacctctgccctcgttgtctctggggcaagtgctgaaggtgttccaaaaggctaanctt

SEQ ID NO: 4141 - DNA, 273 bp, Glycine max
  unsure (1)..(273): unsure at all n locations; Clone ID: 700559068H1
gttcatttctacacatncctagctctgtcgttccgtcgttgacgatggcgtttcgggtgcgaancctgacctccgctctctctttcttctctctctcttgtccatcgcttccgccaatgtcttcttcgaagagcgtttcgatgacggctgggaaaatcgatgggttaaatcagattggaaaaaagatgagaacgtggctggggagtggaaccanacctctggtcaatggaaggagacgctaatgacaaaggtattcaaaccatgaggattaca

SEQ ID NO: 4142 - DNA, 278 bp, Glycine max
  Clone ID: 700559069H1
tggaaacaggcatagcatgctacactcgcgggcctttcctgcctagtgtttcttccaagcactctgccaccctgccatctctccatcttttggcttgaggagtctgaaatcgagctctttatttggagaatctctaagagtggcatccaaatcaacactaaaggtttcaaagacaaagaatacttcactcgtgaccagatgtgaaattggtgacagtctggaagaattcctcacaaaagcaacaccagataaggggttgatcaggttttggtgtccat

SEQ ID NO: 4143 - DNA, 103 bp, Glycine max
  unsure (1)..(103): unsure at all n locations; Clone ID: 700559070H1
ggcagaaatattctaagttggaaanaatagaaactaagatataggatttttcaggaaggggttaaaaaagattattttattgatatntttagaatatttctat

SEQ ID NO: 4144 - DNA, 276 bp, Glycine max
  unsure (1)..(276): unsure at all n locations; Clone ID: 700559073H1
actttggaaagtgaagactctatatncncaanagcaactctctgatgcaaagtgcaaggagcttagcggtcatgacatatttggctccgccaccagaaatcaaacccaggccaataactcctcgcatactggagttganaggaagcatagacattggagaacgtcatgctgatggagatcaaggcgataccaactctgctgggaagacagcnaagaagatctatgacaagaaatttgcagaactttcagggaatgacatattcanggggatgcanc

SEQ ID NO: 4145 - DNA, 274 bp, Glycine max
  unsure (1)..(274): unsure at all n locations; Clone ID: 700559074H1
atcacttttctactttgagtcttcttgatccttctttttctccttgaactcaaacatggcagatgaggtggttctgctagatttctggccaagtccatttgggatgagggtcaggattgcacttgctgaaaagggtatcaaatatgagtacaaagaagaggacttgaggaacaagagtcctcttctcctccaaatgaacccggttcacaagaagattccggttctcatccacaatggcaaacccatttgtgaatccctcattntgttcagtaca

SEQ ID NO: 4146 - DNA, 273 bp, Glycine max
  unsure (1)..(273): unsure at all n locations; Clone ID: 700559075H1
gttcatcccttctcaagccaccgaagcctcactttttgaaattacttgcatagatagataatcatggctatgatgaaacgtgctgcttcctctgcgcttcgctctcttattgcctcatcctccaccttcaccagaaaccttcatgcctcaggtgaaaagaagaagattgtgggggtgttctacaaagggaatgaanatgctaaattgaatccaaattttgttggatgtgttgaaggtgcattgggaatacnngagtggctggatcacagggtc

SEQ ID NO: 4147 - DNA, 273 bp, Glycine max
  unsure (1)..(273): unsure at all n locations; Clone ID: 700559076H1
gtgagtctctgtctcatgtttgtttgtcaggggtttatgtctggtctggtattgtgacgcatgttgttgcagttgcacaacacaaacaaagatanatagattcattcatattagtattagannnnnnnnnnnnnnnnnnngaatttcactcaagttatcaatagttttcgttcatagaaactagaaagatgtgtgaaagtagtagtagcagagtcacatgggaaggttgcagcgtcttgctcgacatcaacgacggtgaccgtctcgttttcg

SEQ ID NO: 4148 - DNA, 272 bp, Glycine max
  unsure (1)..(272): unsure at all n locations; Clone ID: 700559077H1
gttctggaagccgcctctcctctcaggccttccgccactctgtnttctgatccctacagtgagacgattgaattagctgatatagaatgggacaaccttgggtttgggcttcaacccactgattatatgtatatcatgaaatgcacacgaggtggaaccttttccaaaggtgaattgcagcgttttgggaacatcgagttgaacccctccgctggagttttaaactatgggccagggattatttgagggtttgaaagcatacgcaaacaaga

SEQ ID NO: 4149 - DNA, 274 bp, Glycine max
  unsure (1)..(274): unsure at all n locations; Clone ID: 700559079H1
accgttttacgtttgaattggttccattccctaatttctgaagtctgtgctaatatcttcatgtataattactgtccttcagtgcatctggtgttatataaggtggataaaaattactgaaaaaagaaaganagacaaagaagatgatattttcaattatagtttcggagtttgtgttttatcttgccttatgatataagcctctaactgttcgaatttctgaggtctgatgatatctccatgtaaaataatcttgtgaagagttctcatgtat

SEQ ID NO: 4150 - DNA, 277 bp, Glycine max
  unsure (1)..(277): unsure at all n locations; Clone ID: 700559080H1
ctctctcttctcttttccncnncaacatcnnccaangctcacaaagcaacaacannagncaccnngcnaggggaattcaanntnnagcaatggcggtttctncttctgcaacaanatgggtccgtnctngcttctggcgctgctcatncgagaagaagccatggccatggntactacnccacagatctctgacctcaggaatgttgaagttgaaagacacaggttgccgagcttgacgaactcgtcaatggtggagagggcaaaagggctgacaaat

SEQ ID NO: 4151 - DNA, 278 bp, Glycine max
  unsure (1)..(278): unsure at all n locations; Clone ID: 700559081H1
gtcaaatccccaatgtgtgcatggcattgaggttgttccgtcacccaatctaatgggtctcgataaggatgagcagaagaggtggatggaactcactggccgagacttgaatttcacaatccctcctgaagcaagcgatttcagttcgtggagaaaccttcctaacaccgactttgagcttgaaaggccgcctacnccaatcaagagtgctcctaattctcatcctaaaaaactgcttaatggaactgtgctgaatctgtctaaccaagcaatggtga

SEQ ID NO: 4152 - DNA, 278 bp, Glycine max
  unsure (1)..(278): unsure at all n locations; Clone ID: 700559082H1
aganagcgcaaaattagagtcaatactatatctgctggtccactgagaagtagggctgcaaaggctattggatncattgatatgatgatcgattactcatcagccaatgcacctctacagaaagaactatcagcagaggaggtgggcaacacagctgccttcttagcatcacctttggcatctgctatcactggtactgttctatacgttgacaatggtctgaatgctatgggtgttggagttgacagtccaatatttaaagatctgacattcccaag

SEQ ID NO: 4153 - DNA, 277 bp, Glycine max
  unsure (1)..(277): unsure at all n locations; Clone ID: 700559083H1
cgcaaagagagaaacagagagagtaatgaagcgacagagcagcgccgtgtcgccgtcntcgtcgcggcgagaaactccgccggagaagattcacgcgaagaccatcggttgcatgtccggcattctccacttcatctccaantccaattcccgtcgctctcnccgcttcctcacattcggaaagnncccggattaataagaaccccgccgacgccggaaattcgaagccagccgccgatgaacggaggctgtctccgacgtgccgagagtccgactt

SEQ ID NO: 4154 - DNA, 275 bp, Glycine max
  Clone ID: 700559084H1
ctctttcacagcacactcctcccagggtttctccaccaagagggaaatggctcccaaaccgcctagtacgggtctgtttgttggactgaacaagggacatgtcgtcaccaagaaggaattgcccccacgcccctcggatcgtaaggggaaaacaagcaagagggtgcactttgtgaggaacctcataagagaggttgctggttttgcaccctatgaaaagcgtataactgagttgctgaaggttgggaaggataagagggcattaaggttgcaaa

SEQ ID NO: 4155 - DNA, 279 bp, Glycine max
  unsure (1)..(279): unsure at all n locations; Clone ID: 700559085H1
ctgatgttttngaagggaatgatggaaatgatancagtaatccttcacntgattctagctcatggcagcagttacnatntactgtatcaaaggaacctgtccatgaagcttggcctcttcaccgcaagncaattagaaaagttgtcatcaggnaagataaaagggcccgcaaganagaggnaagctttgagaaagctcttttgattgccaacacaaggacaaaagttgatgttgcatggcaggatggaaccatagagcgtggactaaatctacaagttt

SEQ ID NO: 4156 - DNA, 264 bp, Glycine max
  unsure (1)..(264): unsure at all n locations; Clone ID: 700559086H1
cgcactgtgtaatgctatctacgatggctctctctgcgcatatttgccgtttccccgccangcgcgctgacactgctttgccgganactctcaccagaatccggtgccagaagcctctctctgtccgatgctctggcgattccccttccggctctgtgggttcggagttcgatccgaaggtgtttcgtaagaaccttactcggagtaagaattataaccgcaaaggatttgggtacaaggaagagaccctccantcatgaatcg

SEQ ID NO: 4157 - DNA, 275 bp, Glycine max
  unsure (1)..(275): unsure at all n locations; Clone ID: 700559087H1
gtcaccagtatgcatggaggctctgaaaatccacaatccatcattgaatctttgttcaagaagctcatggcggatgctggtgaagngtgcaagtccttgcacctttctgacacacagtggtagtaagcgaagagggtttggcaaagtaanagttactgctgaagactcagtttctccctctgagaccattgcagatgactattatgaagttcttggactgcttccagatgcgacaccagagcagatcaagaaggcatactacaatgcatganatc

SEQ ID NO: 4158 - DNA, 273 bp, Glycine max
  Clone ID: 700559088H1
gttgagaacaataaatttgtgtatctgtgcactaccggaatgtagatgaaaagtattggaattgggtggggcaacgtgttcatgatgttctgaagggctatccacgtttgcgcttaactcatgggcggaaggttttagagatccgacctgtgattaactgggataagggcaaagctgtcacgtttctacttgagtcacttgggctaaacaattgtgatgatgtgcttcctatatatattggagatgatcggacagacgaagagcatttaaggt

SEQ ID NO: 4159 - DNA, 272 bp, Glycine max
  unsure (1)..(272): unsure at all n locations; Clone ID: 700559090H1
aagacaagcagatgtgnactcanttatgctgttgttgggattgttgtgctacttnnttccaatgctgttcanatacagtggtgcctcagctgctctcactgtagacccttcactacacttgtcaagagcttctagcattgtnatgttgattgcatatgttgtctacattgtctttcaactgtggacacacagggagttatttgaagaagaagatgacggtaaagatggcgaggatggttcagaagaacaagctgtgattggatatggagtgg

SEQ ID NO: 4160 - DNA, 275 bp, Glycine max
  unsure (1)..(275): unsure at all n locations; Clone ID: 700559091H1
gtgaggtttaacgngacgatgnaggncgctgtttctggtcttcgttctctnntctttnagctatgnccaccgaacaaatctttncctgctcatatnggtagcattttccggnggtggcnnnagtggccgctctcngagacccaaatacaagatcgaatttcatcccgaagattncccttttcaccctgatgatgatcaggantctatagtcatgccggataaaactggacanaaatatatatgttacttacctaaagtggnaaagaaaaangtgg

SEQ ID NO: 4161 - DNA, 272 bp, Glycine max
  unsure (1)..(272): unsure at all n locations; Clone ID: 700559092H1
gtcttcataaangcctctcttctccgtttccgtttcntcgttcgnattcgctntttgatctgcgaaaatgagagantgcatctcgntccacattggtcaggctggtatccaggncggaaatncttgctgggagctctactgcctcgagcacggcatcgngcccgatgggcaaatgccaagtgacaagacagttggcggtggtgatgatgctttcaatactttcttcaccgagactggtgctggaaagcacgtgccacgtgcatgtntgtnga

SEQ ID NO: 4162 - DNA, 277 bp, Glycine max
  unsure (1)..(277): unsure at all n locations; Clone ID: 700559094H1
tttcttcttcatttcgtttctccgncgtttncntnactcagnatnagcagcaacagcaccaggtgtctactatctgactacacatgtgtctgtgnacattgtctttcaattgggtgaagtctgnntgangagcantgnagacnnataccagtaccantnccccatacaaccanaagncggtcnggttaggcaccgaaaacgctcaaatgacgttattccggaggttagcaaancanatggaccccaattantggttgatgacnaaacaaatncaant

SEQ ID NO: 4163 - DNA, 281 bp, Glycine max
  Clone ID: 700559095H1
gcttaaagagacttgggcatcgattgcatagatctctattaccaacatccgtattgatactcgtgtgcctattggaaatcacgattggggaacttaaaaaactcgttgaggagggaaaaataaaatacattggtctgtctgaggcctcggcttcaacaatcagaagagcacatgcagttcatccgataacagctgtgcagttggagtggtccctatggtcaagagatgtggaggaagaaatagttccaacatggcagggaacttggtattggaatgttgca

SEQ ID NO: 4164 - DNA, 286 bp, Glycine max
  unsure (1)..(286): unsure at all n locations; Clone ID: 700559103H1
gacgagggcgcgcaggtccttgcaggtttagtctcaggtgcgcggaaagtgaagcgacgtgaagatggaggtggngccaggcggncgtctggtaccgatggtgtccgggagcggaggggctcgtccgncagctagaaggaggagccaagatgagcccgttcagtcggggatgaacgggattccgaaacactcctactggctggatctctggctcttcatccttttcgacctggcgttgttcatcttcgtgtacctcttgccctgattggtttgctgagatctagaa

SEQ ID NO: 4165 - DNA, 281 bp, Glycine max
  Clone ID: 700559104H1
atacatgcctacgcttatgataaaagtgaaatggaggaggtttcaatggttgcactttccgggtgtatatggatacaggcttttgtagtaacaatggagaccaattcctttactatattgcaatatatggctatatggggtaatttggctgccttttatgtcatcaactggatcttcagtgcgcttccttcatcggggatgtatacaattatgtttcggttgtgtcgacaaccgtcatattggatagcaatttttctcatggttgcggcggggatgggtcc

SEQ ID NO: 4166 - DNA, 283 bp, Glycine max
  unsure (1)..(283): unsure at all n locations; Clone ID: 700559106H1
ctccgtaaggacgaagccatgttcagctcgagcgccaagattgtnaagcccaatggcgagangccggacgagttcgagtctggcatctctcaggcgctgntcgagctggagatgaactcggatctgaaggcgcactgncgggaactcaacatcaccgcggcaaaggaaatcgaagtcggtggtggtcgaaaagccatnataatttttgtaccagttcctcagctgaaatctttccaganaatccaagtccggctagttcgtgaattggagaaaaagttcagtg

SEQ ID NO: 4167 - DNA, 282 bp, Glycine max
  unsure (1)..(282): unsure at all n locations; Clone ID: 700559107H1
ggacttcgacagtccgtcatcagcacagaaggctgtaactgcactganatccagtggtgtgcaggcacaantggcaaagcaacaggagcaagaccctacaaatntatacatctnanacctccctctgtcaatggacgagcangagctggaggngatgctgaagcccttnggcnaggttatctccactcggatcctccganacaccantggggccagcagaggggtcggctttgcaaggatggaatccacagagaagtgtgaagccatcatcanccactttaa

SEQ ID NO: 4168 - DNA, 168 bp, Glycine max
  Clone ID: 700559108H1
cccggcaccatgtcggagaagagcgtggaggcagcggccgagctaagcgccaaggacctgaaggaaaagaaggacaaggtggaggagaaggctggccggaaagaacggaagaaagaagtagtggaggaggaggagaatggagctgaggaggaggaagaagaaactgct

SEQ ID NO: 4169 - DNA, 277 bp, Glycine max
  unsure (1)..(277): unsure at all n locations; Clone ID: 700559110H1
agaagtagactcatgccttgcttgtattaggactttactgaacccaaataccacaaaattcttnagctcagccctgctagccttaactgagaaagtggaaatttaagatgggatccgtgcancgtatggtgtcaacacccatggcatggtttagtatcataccatatgcttgtttttctgcctgtgaacttgtgagatagnaaaacagctacctagtcatccaattttactgtttgtatatttattggatgttttgtgtacttacatttcaaatgtc

SEQ ID NO: 4170 - DNA, 279 bp, Glycine max
  Clone ID: 700559112H1
cagtcaatatcgagttccctcccagttataatatctaaacaggaagacaatataaagaaatgagtatttataatcttaaatttgaaatttttttcatttcagattttcctgaaaacatgaactatcaagaaagaaatgtgacacaaacctaagcacattattttctatttatgacttaggaattggcctttcatgaccatggctgacatccagatgcctatagagtatatatgcacctgagactgattttgtatagattagaatgattgctatatttgt

SEQ ID NO: 4171 - DNA, 277 bp, Glycine max
  unsure (1)..(277): unsure at all n locations; Clone ID: 700559114H1
gtccctgttcagcgcccggccgtgtggagacccgggagccagtccgggcctcncaggcgaagatggtggactacagcgtttgggatcacatcgaggtgtcggacgatgaggacgagacgcaccccaacatagacacggccagcctgttccgctggcggcaccaggcccgggtggaacgcatggaacagtttcagaaggagaaagaagaactggaccggggctgccgggaatgcaagcgcaaggtagccgagtgccagcgcaactgaaggaatggaat

SEQ ID NO: 4172 - DNA, 86 bp, Glycine max
  unsure (1)..(86): unsure at all n locations; Clone ID: 700559115H1
gcnatctggnttctgcntccgctccatcccctcngcaacccgaagtgcnggaacatgancgtgttgagcgcgcctgangtcnnanc

SEQ ID NO: 4173 - DNA, 282 bp, Glycine max
  Clone ID: 700559116H1
cctcgaatctcgtgcacgtgccgttgcagcaaaaaatgccagaaattcagttgggtatgcatactatcagatcacatggaactagagtggcaaggacacatatgcacgactggttgattcttttgcttcttgtgatcatcgatgctgtcttgaatttaatacagccatttcaccgttttgttggagaggggatgatgacagaccttagatacccattgaaagctaatacaattcccttttgggctgttccgataatagcaatattgttaccactggctgttt

SEQ ID NO: 4174 - DNA, 287 bp, Glycine max
  unsure (1)..(287): unsure at all n locations; Clone ID: 700559117H1
gacccgtcaacatgggccgcgttcgcaccaanactgtgaagaaggcggcccgggtcatcatcgagaatactacacgcgcctgggtaatgactttcacaccaacaagcgcgtgtgcgaggagatcgccatcatccccagcaaaaaccttcggaacaagatagccggctatgtcacgcatctgatgaagcggattcagagaggtcctgtgagaggcatctccatcaagttgcaggaagaagagagggagaggagagataattatgttcctgaggtctcagccctagatc

SEQ ID NO: 4175 - DNA, 284 bp, Glycine max
  unsure (1)..(284): unsure at all n locations; Clone ID: 700559118H1
ggtccaacatggctccgcggttgtgcatcatctctgcagcagcacggcggctgctaaggaagccgggaccctgtnttggggacctcgcggctgcgcgtgctgtgcgattctattccaaggacagtgaaggcanctggttccgctccctctttgttcacaaggtggatcctcggaaggacgcncactccactctgctgtccaagaaggagactagtaatctctacaagatccagtttcacaacgtgaagcccgaatgtctggntgnctacaacagtctgacggag

SEQ ID NO: 4176 - DNA, 252 bp, Glycine max
  unsure (1)..(252): unsure at all n locations; Clone ID: 700559119H1
ganccgagatgcctaangganctagagagngaggccataaaggccgngtgaggcagtatacaagccctgaggagatcgatgcccagctacaggctgagaagcagaaggccaacgaagaagatgaacaagaagaaggtggagatngggcttcgggtnaccccaaaaaggagaagaaatctctagactcagatgagagtnnagatgaagatgatggctaccagcaanagcgnaaaggtgtggaagggtcattga

SEQ ID NO: 4177 - DNA, 272 bp, Glycine max
  unsure (1)..(272): unsure at all n locations; Clone ID: 700559121H1
tggcatttgtacacagactacactaaaggatggagtgcaagggtgacacttnntaactggggtgacactaattttgcagactggtttgccgcagtacaaatggacaaagcagcttcgggttttgagaaaatgtattcattcaatgcaactcttctagatggtgtaaacaatacaataatcatgcaaggtttgccaggattgaactaccttgtagcagaagcagatggagctgaccctttgagagatcctagggtgcctggtaaacaacaatc

SEQ ID NO: 4178 - DNA, 241 bp, Glycine max
  Clone ID: 700559123H1
tagtgtatgccactctggttaattatcatacccccttctaggcatagttcttctccctctgttctctattctacactgtgaaaccaagatgaaggtagcatttgtagctgttctacttatttgccttgtcctaagctcctccttgttcgaggtgtcaatggccggttctgctttctgctcctccaagtgcgcgaagaggtgttctagggctgggatgaaggacaggtgcacgaggttctgc

SEQ ID NO: 4179 - DNA, 281 bp, Glycine max
  unsure (1)..(281): unsure at all n locations; Clone ID: 700559124H1
angactcancgatgnatcaaagatagccattntgaatgnaaactacatggcaaaacgagtggagnnttattacccggttcttttccgtggantcaatggaacagttgctcangaattcatcattgacttgagaggctttaagaatactgctggaattgagcctgaagatgttgcaaagcgcctcatggactacggttttcatgnaccaacaatgtcatggcctgtgcctggnacactcatgattnagcctactgagantgaaancaaggccgagttanaca

SEQ ID NO: 4180 - DNA, 278 bp, Glycine max
  Clone ID: 700559125H1
ttcactccgacccatttgcataacttcgctgatctctcgttttcaccatctgggtctccccaattttcgcctcgattcttgttcttctcgatccattggtgatggcatcgatgggttctttaccgtttcttgtggaagccaatgccgactccactttgatgatgatgatgcttcagaacaggaatcacaagttttcttcaccaaagtttaacactgtgaatgcttcatcgttagtaagaggatgggggcgtggaagagtgaaccataggtgtagtagt

SEQ ID NO: 4181 - DNA, 278 bp, Glycine max
  unsure (1)..(278): unsure at all n locations; Clone ID: 700559126H1
tnangcnaagcngtgtttgcataaaatgtactaaacagtgtcattatacactactttgaaaattgtcacatgtttctaagaaacaattactttttatgcnaacacagcttggctttaagacaatgacaaaagttatgcaggttacacagtggagtattactcaactcccaactacgacagtgnccntacagtctctctttaaacagcatagggcttcaatgaaaacagagtgcaattaatgtcatggcttgtaaagtctgattacagaggtacagcaa

SEQ ID NO: 4182 - DNA, 182 bp, Glycine max
  unsure (1)..(182): unsure at all n locations; Clone ID: 700559128H1
gncgccgcttgtgccgccgcnatgtccctagtgatccccgagaagtttcancacatcctgcgagnactcaacaccnacatcgatgngcggcggaaaatanccttcgctatcactgccattnanggtgtggngcggngatacgctcatgtggtgttgangaaagcagacattgacctcaccaa

SEQ ID NO: 4183 - DNA, 278 bp, Glycine max
  unsure (1)..(278): unsure at all n locations; Clone ID: 700559131H1
ganttcgcngangannnggctacattanaggcatcgtaaaggacatcattcatgaccctggccgcggctctcccctcgcganantantctttcgtnatccctatcgattcaagnnncgnacagagctgttcatcgccgnanagggaatccacactngacagtttgtgtactncgncaaganggcccagctgaatatttgcaatnngntgcncgtnggcancatncctganggtactatcgtgtgttgtctggaggagangcctgcggacagggcaagc

SEQ ID NO: 4184 - DNA, 285 bp, Glycine max
  unsure (1)..(285): unsure at all n locations; Clone ID: 700559132H1
agaaagcaagctcatcctagagttttaaaaatggcagcagcctcctccatgngctctctcttccccatccttggctggcaaggccgtgaagctgggcccatcagcccccgaagtcgggagggtcagcatgaggaagaccgtcaccaagcaggcctcctccggaagcccatggtacggcccagaccgcgtcaagtacttgggcccattctctggcgagcccccgtcctacctcactggcgagttcccaggtgactacggctgggacactgctgggctttcggccga

SEQ ID NO: 4185 - DNA, 279 bp, Glycine max
  unsure (1)..(279): unsure at all n locations; Clone ID: 700559135H1
gcgttnggttacgttatagaaaatggnggcattgacacagaagcncattatccttacacagcncaaaacggtacttgcaaggcgantgcacacaaggttgttantattgataancttctagttgtggttggancanaagaagctctcttgtgccgtgtnagcaaacaacctgttagcgtnacatagatgcaactggccttcaatttatgcgggtngagtctatngtggtgagantgctcanagaattcancaanagcgactcttgtntgtttaatcgng

SEQ ID NO: 4186 - DNA, 108 bp, Glycine max
  unsure (1)..(108): unsure at all n locations; Clone ID: 700559136H1
actnaacanggtcatgtgcccngtttgtgcttactcngccaaactctgtgnctacnaatctcggaagcacngtnaaactgtgcgngcaagcgcagcactggnannatt

SEQ ID NO: 4187 - DNA, 281 bp, Glycine max
  Clone ID: 700559137H1
gccagaggtaacctgtgaagatggttcgctactcccttgacccagaaaaccccacgaaatcatgcaagtcaagaggctcaaaccttcgtgttcactttaagaacacccgggaaactgcccaggccatcaagggtatgcatatccgcaaagccaccaagtatctgaaggatgtcactttaaagaagcagtgtgtgccattccggcggtataatggtggagtcggtaggtgcgcccaggccaaacagtggggctggacacagggacggtggccaaaaaagagt

SEQ ID NO: 4188 - DNA, 280 bp, Glycine max
  Clone ID: 700559138H1
gggaaagcatgggacaccggtatattgaggtgttcaagtcacacagaaccgagatggattgggtgttgaagcacagtggtccaaacagcgccgacagtgccaatgatggctttgtgaggcttcggggactcccgtttggatgcacaaaggaagaaatcgttcagttcttctcagggttggaaattgtgccaaacgggatcacactacctgtggacccggaaggcaagattacaggggaggccttcgttcagtttgcctcacaagagttagccgagaaagc

SEQ ID NO: 4189 - DNA, 280 bp, Glycine max
  unsure (1)..(280): unsure at all n locations; Clone ID: 700559139H1
anaagttgcaaacttatctgctatcaagagatcatttgaagttgaagtctgagtntcaagatggaaatgganaganaattgtcgattcaattgancagctacctgctgtggaagtggttcttggtcagcatgtctntttcactgtgggggactattcccttgctggaaaatctgactgatcatatnntccaagtgttcctntntgatcttttatccagtntgcatgctatctgtttgcaagattaggaatanagaatatacccaggcatgcctaattgta

SEQ ID NO: 4190 - DNA, 279 bp, Glycine max
  Clone ID: 700559140H1
cacaaactcagaaacagacaccatggtgcacctgactgatgctgagaaggctgctgttaatggcctgtggggaaaggtgaaccctgatgatgttggtggcgaggccctgggcaggctgctggttgtctacccttggacccagaggtactttgatagctttggggacctgtcctctgcctctgctatcatgggtaaccctaaggtgaaggcccatggcaagaaggtgataaacgccttcaatgatggcctgaaacacttggacaacctcaagggcacctt

SEQ ID NO: 4191 - DNA, 281 bp, Glycine max
  unsure (1)..(281): unsure at all n locations; Clone ID: 700559141H1
aaagccttagccttccctacaactccaaacaacnnagacatcatcatccatggctgcctccgtcctccactgtcggagcngtcaacagagctctnttgaacctgaatggttctggagctggagcttcagctcccagttcagccttcttngggaccagcttgaagaaggttattgcctcaagggtccccaacagcaaggtttccggtggaagcttcaagattgttgctgtagaagagaagaaagagattgaagagacccagcagaccgacaaggacagatgg

SEQ ID NO: 4192 - DNA, 97 bp, Glycine max
  unsure (1)..(97): unsure at all n locations; Clone ID: 700559142H1
ggtagggtggggacagtctccaagaccttaggagggncagattnagaaggagctnctggagacagtgtggtcacctacaggatcctttnggnactaa

SEQ ID NO: 4193 - DNA, 274 bp, Glycine max
  unsure (1)..(274): unsure at all n locations; Clone ID: 700559143H1
ggaggtctggtgagagcttcagatgtatgccctgctaaccaacctgggangtctggtatggacgcagcaagagcgatctcagaggaggatggatgggacacgaactgagctgacgccgtttctcaggactgacctgttctacataaatatacacgtttcctatggaataatgtgatactgnttcatgttactagacactgaacggtttcctcattcccttaaaatgtattcggccttcccgtgaaatctataaacagcagnactgataaaaaaa

SEQ ID NO: 4194 - DNA, 277 bp, Glycine max
  Clone ID: 700559144H1
ggaaactcaaccaccaatactgccattgccagtaacttcacggcccaatcacaggcctggtggagctcctacccaaactcatcatcatggctatagttatagaggacgtggaagaggaagaggaactgggggtttccgctcagtcacaaaattcactgaagattttgatttcacagcaatgaatgagaagttcaaaaaggatgaagtatggggtcatcttggtaaaagtaagtctcattcaaaagacaataacggggaagaaaatgcctttgatgaa

SEQ ID NO: 4195 - DNA, 277 bp, Glycine max
  Clone ID: 700559145H1
ctaggacaaaagttatcacagtgcatacgtgacaatctaccctcaaaactctcagcatcaatcaaacagtcacaagaaaaggccatgaaacactatgatgctaatgccacaaaatggtggcagtcgtggtgatgtccatgttgaggataaccaaaacatgtcctttccgtcgtgggagggaacctttatgaggtgcttcagtgaaatagatgaaaagcttgctaagaacatcgacactgatggatttcatggcggtacacttctgtatctgtactca

SEQ ID NO: 4196 - DNA, 278 bp, Glycine max
  unsure (1)..(278): unsure at all n locations; Clone ID: 700559146H1
gagacagtcagtctgcttctatggactcctcancagcttgtgttttctagggagctgaccaagtcactgcttcccaggtaggagctgcagatatgggggcccttctgtggtcactcctgctgctgcttcatgaagccaaagggttttctggagatgatgaggaccctgaggaagtggttgctgtccttcaagagtctgtcaacctctctctggaaataccatccaatgaagaaattgacaacattatctggttctctcaaaaaaaccttgccaccgtg

SEQ ID NO: 4197 - DNA, 280 bp, Glycine max
  unsure (1)..(280): unsure at all n locations; Clone ID: 700559147H1
gcgcgagcncggaacgagaatccacgagttgtaagaaaatggcagacaagcnggacatgggggaaatcgccagcttcgataaggccaagctgaagaaaaccgagacgcaggagaagaacaccctgccgaccaaagagaccattgaacaggaaaagaggagtgaaatctcctaaaagcctaggaagatttccccaccccaccccttcatctccaagaaccccctcgtgatgtggaggaagagccacctgcaagatggacgcgagccacaagctgcactgtg

SEQ ID NO: 4198 - DNA, 281 bp, Glycine max
  Clone ID: 700559148H1
gtttttttgatatggcgccttgtatttctttccagtcttgccccccgccccccattctcccagttctccagcccaccgtactcggtctgcatccccggatggttcctcagtggccgcgggatacggagcctgctgctaaggaaccgggattctccatttcggcagtagaagcacggaccctaatggtcgcatgcgcagtgataattccgcggcctaccgaccgcgccttttgactgctgttcaggtgaagattgtggtgaggaaggagaccagaagatggg

SEQ ID NO: 4199 - DNA, 284 bp, Glycine max
  unsure (1)..(284): unsure at all n locations; Clone ID: 700559149H1
gcagagagaagcagactccttagtttcaggggacctagtgctaaagcctacagccatgacctggnacctaaaggtgaagatgctggggggcaaggagttcctggtgtccatgacaaactccatgatgctgtcagaactgaagaagcaggttgctcagaagagtggtgtgccagctttccagcagcgcctggcccaccaaagcggtgaaatgctacaggatggtgttgcccttatcaggcagggccttagttctggcagcacagtcatgctgatggtagagaact

SEQ ID NO: 4200 - DNA, 279 bp, Glycine max
  Clone ID: 700559151H1
ctcagttctctttagacaccagtgtctgaagttccctgtgattctatggcttcagtgtgaagaactgtggagcccagcctgccctgcacttcaggaccctgtcccttcactgcccgctttcccttccacattcagccttgctggtccagcctgggggtggagggtggggacatctgcatcctgtccccctgtgctaccctgagcttcagcccctcacttccaccctgagaataagaatctgagtgtgaattgattgttcacatccttgacacaagtgta

SEQ ID NO: 4201 - DNA, 278 bp, Glycine max
  Clone ID: 700559152H1
atgcttagaagtctacctgttcacttggaaatagaatgaaaataggtatggatttttaaatttttcagtaagtttcttaaatacatggtgtgaagtactatttgcatggcataaacaggtttttaaaagatcaagccttactcatttgtcttatcattagatacttaaagaccaaatgcaaaactgactgaatttgtcctgaggcaaacagtaaaggcatttcaggtgttgaccgcagactccagcagctgacaggtttcttcttgcacttggggttg

SEQ ID NO: 4202 - DNA, 278 bp, Glycine max
  Clone ID: 700559153H1
ggctggtgttgcagagagactcagggcctacctggagggcacgtgcgtggagtggctccgcagatacctggagcacgggaaggagacgctgctgcgcttagatcccccaaaggcacatgtgacccttcaccccagacctgaaggtgatgtcaccctgaggtgctgggccctgggcttctaccctgctgacatctccctgagctggcagttgaatggggaggacctgacccaggacatggagcttgtggagaccaggcctgcaggggatggaaccttcc

SEQ ID NO: 4203 - DNA, 276 bp, Glycine max
  unsure (1)..(276): unsure at all n locations; Clone ID: 700559155H1
anattggagtcgtttggtgaactggtggggctctgggaggcaaaggtcagttccgggccgtagggcggnaggctttggggcaagagagtcaggaaggatcccgcggacgaganccgggatctgaggggtttgagagggcggggcttgangaagcgaactggttgacccggctcctgantggatctgtcggnccanaacccgcagtcgtgcagcncccaggtttctttcatngcggtcagagcgtcgttcgagaacaactgtgaggtcggttgtttt

SEQ ID NO: 4204 - DNA, 275 bp, Glycine max
  Clone ID: 700559157H1
gggagaggagtcgccgccatgtccgcgcatctgcaatggatggtcgttcggaactgctccagtttcttgatcaagaggaataagcagacgtacagcacggagcccaataatctgaaggcccgaaactccttccgctacaacgggctaattcaccgcaagacggtcggagtggagcctgcggctgatggcaaaggggtcgtggtggttatgaaacgcagatccggtcagcgaaaacctgccacttcctacgtgaggaccaccatcaacaagaatgt

SEQ ID NO: 4205 - DNA, 275 bp, Glycine max
  Clone ID: 700559158H1
ctggagacgacgttcagaaatgcgcacctcgcaaggggaaggaaaagaaggaagaacaggtcatcagccttggacctcaggtggctgaaggagagaatgtatttggtgtctgccacatctttgcatccttcaatgatacctttgtccatgttactgatctttctggcaaggaaaccatctgccgagtaactggtggaatgaaggtgaaggctgaccgagatgagtcctctccgtatgcagccatgttggctgcccaggatgtggcccagaggtgc

SEQ ID NO: 4206 - DNA, 276 bp, Glycine max
  Clone ID: 700559160H1
ccttgtgaccacaaggttcaacttgtgagggggatcaaaacattcctagattggaatatggcaaaacttggttgttctagtcgtaggaaagcaattgaggagctccttagagggcgtgattgtgccaaacaacttaggagtgtcatcaatgggagttgtgaagatggatcatcaacaaccccatcatttgctgaacaacttgtgaaggaggtgctcatgtccttcaccaactccctctcgttcttgaagaacaaccccacttctgaatcccatgat

SEQ ID NO: 4207 - DNA, 278 bp, Glycine max
  unsure (1)..(278): unsure at all n locations; Clone ID: 700559161H1
gccacatcacctatcatagaagaacttacaaactttcatgacnacaccctaataattgtattcctcatcagctccctagtactttatattatttcactaatactaacaacaaaactaacacacacaagcacaatagacgcccaagaagtagaaacaatttgaacaattctcccagctgtcattcttattctaattgcccttccctccctacgaattctatacataatagacgagattaataacccagttctaacagtaaaaactataggacaccaatg

SEQ ID NO: 4208 - DNA, 277 bp, Glycine max
  Clone ID: 700559162H1
gacatattaaaatagccgattttgggagtgtgaagcctatgcaggatagccaaataactgtccttccaaatgcagcatcagatgacaaagcctgcacttttgtgggaacagctgcttatgttcctccagaggttcttaattcctctccagcaacttttggaaatgacctttgggcacttggctgcacattataccaaatgctttctggaacttccccttttaaagacgcaagtgaatggcttatttttcaaagaattatagcaagagaacttagatt

SEQ ID NO: 4209 - DNA, 281 bp, Glycine max
  unsure (1)..(281): unsure at all n locations; Clone ID: 700559163H1
taaccaaacacaccacatggaaatcagccaaatcccgtttttcacccaagaggactactgctcacttctacaacctctacgaagnccacagactctaacaacagtctcaacaataacaacagcaacaacaagagaaagcgtaacaacagaaaagaagaaggtagtggtggaggtgcagaacaaaaagggcnnnnnnnnnnnnnnnnnnncgagaacagtgaaagtaacttgaaggacttacttgcttcgctgattatgttagacgaggaagaaattcaaga

SEQ ID NO: 4210 - DNA, 281 bp, Glycine max
  unsure (1)..(281): unsure at all n locations; Clone ID: 700559164H1
gctgtgtaatcactgagacgcggaggggcttgcggcttctaaaatgccggantacctaggtgcagaccagcggaaaaccaaagaggatgagaaggacgacaagcccatccgagctctggatgaaggggatatcgccttgttgaaaacttatggccagagtacttattcgaggcagatcaagcaggttgaagatgacattcagcaacttcttaaaanaattaatgagctcactggtatcaaagagtccganactgggctggcccctccagcccnctgggatt

SEQ ID NO: 4211 - DNA, 228 bp, Glycine max
  unsure (1)..(228): unsure at all n locations; Clone ID: 700559167H1
gngactcagactcctgggacgcggncacgntctctatggaggacccggttcggaaggtcgcgggcggcggcacagcaggcggggaccgctgggaaggcgaggacgaggacgaggacgtgaaggataactggnnnnnnnnnnnnnnnnnnnnnnnnnnagaagcagaagtcaaaccagaagtaaaaatttcagaaaagaaaaaaatagcaganaagatannagagaaag

SEQ ID NO: 4212 - DNA, 246 bp, Glycine max
  unsure (1)..(246): unsure at all n locations; Clone ID: 700559168H1
cttgggggaaaagctagaggctagagtcatggatgaccagcgcgacctcatctctaaccatgagcagctgcccatcctgggccagcgtgctagagccccagaaagcaattgcaaccgtggagtcctgtacaccagtgtctctgtcctggtggctctgctcttggctgggcaggccaccactgcttacttcctgtancagcagcagggccgcctggacaagctgancgtcacctccnagaacctgca

SEQ ID NO: 4213 - DNA, 89 bp, Glycine max
  unsure (1)..(89): unsure at all n locations; Clone ID: 700559169H1
ggccttagctgctctcaaacagattcagcgttggccggtcgctctcccgcncngcttgcagtgcgggcccaggaaagcaccgtcagcct

SEQ ID NO: 4214 - DNA, 97 bp, Glycine max
  unsure (1)..(97): unsure at all n locations; Clone ID: 700559170H1
ggtagccagagcnaaccctccgctnacttgncagatngccanncgcctncatgacttntggaaganttctctgctnccatcgtgctantacaggtgc

SEQ ID NO: 4215 - DNA, 277 bp, Glycine max
  unsure (1)..(277): unsure at all n locations; Clone ID: 700559171H1
gggctcaggaagaggggttgtnaaagcagatacttattcaggttctacatctgttgcatcatgctatgccaagtttatctacagcaaatgttgatgcacanacagttgctactccctttagancagatgtatctnccctgggttcatatacacaatctgtgattgttggaagtggtcgaagaaggtnttcaganatgcctcattctgcttcaactcacaaggaacaacctcaaacaacttaccgggaccgtgcagctgagangaggagtttatatgg

SEQ ID NO: 4216 - DNA, 281 bp, Glycine max
  unsure (1)..(281): unsure at all n locations; Clone ID: 700559173H1
ctagggttatcatatctccatttccatttcctctcnctcagtttccaagaatcttaagctatgggaaagtcttacccaaccgtgagcgctgattaccagaaggccgttgagaaggcgaagaagaagctcagaggcttcatcgctgagaagagatgcgctcctctaatgctccgtttggcatggcactctgctggaacttacgacgtgagctcgaagaccggtggtcccttcggaaccataaagcacccctccgaactcgctcacggcgtaacaacggtctt

SEQ ID NO: 4217 - DNA, 279 bp, Glycine max
  unsure (1)..(279): unsure at all n locations; Clone ID: 700559174H1
gtgggaaatactgaaaaatatagttggtcgtttcctgtcttgtaaatttagatctactttgttgcagagcagctttactttgttactttcaacaggggtagaagcaaggtgggaaatactgaanaatatagttggattttaagtttgagtttttcgtcttaatttagtcttctgtttattttctatctgttgattgacttgggcatagtggaaaaagaattatatttgtggacaatctgttatgtaataggggtgtttttctggctatgaagctcacca

SEQ ID NO: 4218 - DNA, 274 bp, Glycine max
  unsure (1)..(274): unsure at all n locations; Clone ID: 700559176H1
ctcacaaaggcttgcagatgcaaacattcttntctcggagttttctagccttaaaagcattgtaatgtggaccgctttaatttcaggacatattcaaaatgagtgcagtgatgtggccttaaacttgtatcgagaaatgcgtgacaacaatatctcacctgaccaagcaacatttgttactgttcttcaagcttgtgctctcttatcctcgttgcatgatggtagagagatacattctctaatcttccatactggttttgacttggatgagtta

SEQ ID NO: 4219 - DNA, 276 bp, Glycine max
  Clone ID: 700559177H1
aagacattaaggagttcaaagaaagcactaaggttgacaaggtggttgtcctgtggacagccaacacagagaggtacagcaacgtagttgtgggactaaacgacaccatggaaaacctctttgcttccttggacaggaatgaggctgagatttccccttccaccttgtatgccattgcttgtgttatggaaaatgttcctttcatcaatggaagccctcagaacacctttgtcccaggactcattgatctggccatcaaaaggaatagtttgattg

SEQ ID NO: 4220 - DNA, 237 bp, Glycine max
  Clone ID: 700559179H1
tagtgtatgccactctggttaattatcatacccccttctaggcatagttcttctccctctgttctctattctacactgtgaaaccaagatgaaggtagcatttgtagctgttctacttatttgccttgtcctaagctcctccttgttcgaggtgtcaatggccggttctgctttctgctcctccaagtgcgcgaagaggtgttctagggctgggatgaaggacaggtgcacgaggtt

SEQ ID NO: 4221 - DNA, 279 bp, Glycine max
  unsure (1)..(279): unsure at all n locations; Clone ID: 700559180H1
gcaccacattcacctgaggcttccaaagcaatggcttcccttgcagcatccactgctgctgcttcccttggcatgtcagaaatgcttggaaaccccatcaacttcagtggtgccacaaggccagctccatctgcttctagtcctgcctccttcaagactgtggctcttttctccaaaaagaaggctacaccaacacctccaaaaaaannnnnnnnnnnnnnnnnnnncaatgatgagcttgccaagtggtatggtcctgacagaaggatcttcttgcct

SEQ ID NO: 4222 - DNA, 279 bp, Glycine max
  unsure (1)..(279): unsure at all n locations; Clone ID: 700559182H1
ctcacacaatctgggaaccacacacacaanccattcccttttctcactacggcaatgaccacccaagcttccaccttcgccgtcgccgttccctccgtcgcaacccctttccgccgccaccggaatcccttcgttgttcgagcccaagcggaaccttcagataaatccgttgaaattatgaggaagttctcagagcaatacgcccgtaagtcaggaacatacttttgtgttgacaagggggtcacttctgttgttatcaaggggttggctgaccataaa

SEQ ID NO: 4223 - DNA, 279 bp, Glycine max
  unsure (1)..(279): unsure at all n locations; Clone ID: 700559183H1
cgagcatcttcgagttgcatttcgcagtgtgtgtgagaagaagaganaaatggagaaaatgatgcgactnanaccactgttnccgatcactganttncagatcttatcatgcnttcccattcatcaaccatgtcgttcttcgaccttctcttatctctcgctctcccaatccncttccttctccttcacactcagaatgcatgtctcctttctcgatgggtttagggagcatgcgattctanagtgaagatttgacccacgtgcccaatattaaggacc

SEQ ID NO: 4224 - DNA, 276 bp, Glycine max
  unsure (1)..(276): unsure at all n locations; Clone ID: 700559184H1
ttgtcatccgacctttgccatgacaggtgcgcttgcatggcaggtcaaaaaatgttaataanaaaagttttattggtttggggagagatcgcacgggggttgcccggggtctcttcctcttgtgtggtgtggtgtttgctgtgctctccttttcgttatgccttttattattacctatctgtcgctccactccgtattacgactctggatcagaggatacatcagaggattcgctccaacccctatcgagtaaggtattatctgtcaatttacatt

SEQ ID NO: 4225 - DNA, 276 bp, Glycine max
  unsure (1)..(276): unsure at all n locations; Clone ID: 700559185H1
cgagcatcttcgagttgcatttcgcagtgtgtgtgagaagaagagaaaaatggaganaatgatgcgactgagaccagtgttccgatcantganttgcagatcttatcatgnctncccattcatcaaccatgtcgttcttcgaccttctcttatctctcgctctcccaatcctcttccttctncttcacactcagaatgcatgtctcctttctcgatgggttnagggagcatgcgattctatagtgaagatttgacccacgtgcccaatattaagga

SEQ ID NO: 4226 - DNA, 276 bp, Glycine max
  Clone ID: 700559186H1
gtcagtgcagtcagcttgcagcgggctgtgagggagagtgcctttgtcctaagaaatgtgctttgtgtttttcttttttactgctttctttttaaacccccaagacaggcttgagaagacttctgaaatgattttttaaagccgaatagaagacaggatccgacacctcccacaagcccttgacgggttttgtttgagtctgatttttttgtgtgtatgattttttttttaaagccttttacatactttgttttgatcttgtgaggctgggcctct

SEQ ID NO: 4227 - DNA, 274 bp, Glycine max
  unsure (1)..(274): unsure at all n locations; Clone ID: 700559187H1
cgagctgagcagttgccatggtcctgggatctgctgcactattcgtcttnagcctgtgtgtcactgagctgaccctccatgctgctgacacctgcccagaggtgaaggtccnggatctggagggctccaacaaactcaccatccttcaaggctgccctggcttgcctggagccctggggcccaagggagaggctggtgccaaaggagatagaggagagagtggccttcctggacaccctggaaaggcggggccaactggacncaaaggagaccg

SEQ ID NO: 4228 - DNA, 276 bp, Glycine max
  unsure (1)..(276): unsure at all n locations; Clone ID: 700559188H1
gtggcgctctggtcccacagctttgtccggacttggggtagctgtgggaaggcgatgactgangcactctctgcgcaagccgaggcagcgggcggactgaaggctttgattgagcaaaatggagatactggtagcgacaccaggggagagccgcacctagagctcctagagccagcgacggtagggaagcaggtcccggagagcggggagcaggcccagggaggcgaagagcagctcccggggaacgganagcaggccccaactccagtcgccgat

SEQ ID NO: 4229 - DNA, 280 bp, Glycine max
  Clone ID: 700559190H1
cagaaagcaagctcatcctagagttttaaaaatggcagcagcctcctccatggctctctcttccccatccttggctggcaaggccgtgaagctgggcccatcagcccccgaagtcgggagggtcagcatgaggaagaccgtcaccaagcaggcctcctccggaagcccatggtacggcccagaccgcgtcaagtacttgggcccattctctggcgagcccccgtcctacctcactggcgagttcccaggtgactacggctgggacactgctgggctttcg

SEQ ID NO: 4230 - DNA, 100 bp, Glycine max
  unsure (1)..(100): unsure at all n locations; Clone ID: 700559191H1
gtntggaaacatggacttcggntactnctactctgtagcncaaactcagnncttcagggcaaatggggaaagggcntntnctgaaattnctctggcctcg

SEQ ID NO: 4231 - DNA, 274 bp, Glycine max
  Clone ID: 700559193H1
catttggggacattttgatgacccagtattcatcatccctggctgtgtcagaaggagagaaagtgactatgagctgcaagtccagtcagagtcttttatggattggaaatcaaaggagctgtttagtctggcaccaaagaaaaccagggcagactcctaaaccactgatcacctgggcatccaatagggaacctggggtccctgatcgttttataggcagtggatctggaacagattttactctcaccattagcagtatgcaggctgaagatgt

SEQ ID NO: 4232 - DNA, 275 bp, Glycine max
  Clone ID: 700559194H1
ggtgtatgcaataatgcacaagcaggaagtctttcagcctttcaagaatcacccccgtttcgatgagcttgttgaaaacatctacactgtgttagatttttttaatagtcgcatggatgcccaaagaatgaatggtgattggtctgtcaatttagtgctccaagtgataattatgaactgtcggtcttggcatgctgatgggatgaagatgtttactcaacttcatttcacatatgaacaagagagtcacccagaggagttttttatcccatatg

SEQ ID NO: 4233 - DNA, 179 bp, Glycine max
  unsure (1)..(179): unsure at all n locations; Clone ID: 700559195H1
atggccccaaattctcgaagtctggtgatgctgncattgttgacatggtccctggcaagcccatgtgtgtnnaaagcttctcngactaccctccacttggtcgttttgctgnncgtgacatgaggcagacagntgctgtgggtgtcatcaaanccgtggacaagaaggctgcaggagct

SEQ ID NO: 4234 - DNA, 279 bp, Glycine max
  unsure (1)..(279): unsure at all n locations; Clone ID: 700559196H1
ctggagacgacgttcanaaatggcacntcgcaaggggaaggagaagaaggaagaacaggtcatcagccttggacctcaggtggctgaaggagagaatgtatttgcgngtctgccacatctttgcatccttcaatgatacctttgtccatgttactgatctttctggcnagganaccatctgncgagtaactggtggaatgaaggtganggctgaccgagatgagtcctctccgtatgcagccatgttggctgcccaggatgtngcccagaggtgcaang

SEQ ID NO: 4235 - DNA, 298 bp, Glycine max
  unsure (1)..(298): unsure at all n locations; Clone ID: 700559201H1
gtggttagcaagatgaacaaagatgcgcagatgagagcagcgattaaccaaannttaatagaaactggagaaagagaacgcntcaaagagttgctgagagctanattaattgagtgcggctggaaggatcagttgaaggcacactgtaaagaggtaattnaagaaaaaggactagaacacgttactgttncatgacttggtggctgaaatcactccaaaaggcagagccctggtacctgacagtgtaaagnaggagctcctacagagaatcagaacttccttgntcagcatgccagtc

SEQ ID NO: 4236 - DNA, 290 bp, Glycine max
  unsure (1)..(290): unsure at all n locations; Clone ID: 700559203H1
cataagtgtagttttagagtcctcactgcttggtccccaaagccttattacttaccttttagcgctggctttaattaggtttgcaacgtgctgcctcagccccctgcaggcaggcccaggtaggactncctggaggctgtgcttttaactttgtaacagacatttccgaaccaaaggctgctgggtttgcatgtttacaggctccaccctagggccagtgtcagagctggctttggggagctgggcaaggaagaggaggcccagcccagactcttcctggcctttctcaa

SEQ ID NO: 4237 - DNA, 288 bp, Glycine max
  Clone ID: 700559204H1
ggctgatacggacccgcgctatccccgctcttccatcgaggatgacttcaactatggcagctgcgtggcgtcggccagcgtgcacattcgcatggcctttctcaggaaagtctacagcatcctgtctctgcaagttctcctaacgacagtgacctctgccctgttcctgtatttcgaaaccttgcgtacttttgtccatgacagccctgccttaattgtggtgtttgctctcggatctctgggcttgatctttgcgttgactctgcacagacacacgcatcctctgaa

SEQ ID NO: 4238 - DNA, 288 bp, Glycine max
  unsure (1)..(288): unsure at all n locations; Clone ID: 700559205H1
acaaactcanaaacagacaccatggtgcacctgactgatgctgagaangctgctgntaatggcctgtggggaaaggtgaaccctgatgatgttngtggcgaggccctgggcaggctgctggttgtctacccttggacccagaggtactttgatagctttngggacctgtcctctgcctctgctatcatgggnaaccctaaggtgaangcccatggcaaganggtgataaacgccttcaatgatggcctgaaacacttggacaacctcaagggcacctttgctcatctg

SEQ ID NO: 4239 - DNA, 291 bp, Glycine max
  unsure (1)..(291): unsure at all n locations; Clone ID: 700559206H1
cccaggaagactacaaacacactctaaggactaccctccctgctcanataagcccatttcctgccttgctgaagatttatnnactggacattgctgaggaatttccaggcaggctcatctataatttgcaaaatggtgaatgaatacaaggaaattgtncttataaaaggattagaggatatgaaggnctatgcatttagaaccatcaagtccttactaagaaaagaactanacctaactanaaaaatgcangatgattatgacaggnttcaactggctgacctgttggag

SEQ ID NO: 4240 - DNA, 292 bp, Glycine max
  unsure (1)..(292): unsure at all n locations; Clone ID: 700559208H1
gccgctgctcccgctggcctgnaggaccgtgcttggcttggtgacaggaacattgcccatcctcttcncctcctgctcacagacccatcacacacacccagngcgtctcaggatggagctctgatcgncacctggcncaagaggcaggctatntgctnactcatgcgcttcccgtccacnnggntctacacaaccagnctagaagcctctgtcacgagcccccaagtaagcggcttggcaaatccagccggattccagaatcacattctctgggcacccnctcttctcgncc

SEQ ID NO: 4241 - DNA, 291 bp, Glycine max
  Clone ID: 700559209H1
aaagaatgcagatcagaggtttgctgcgttcttagcccctttgacttctggtcgtgttactattagctgttagtgctgtttacatatccaagattagcttggccattgctataagatatgcattgacaaggcaagcattctccattacaccaaacgggcctgaagtcttcctgcttgattaccctagtcatcaacggcgtctgttacctttacttgcaaaggtatatgcaatgagttttgccgcaaatgagctcaaaattatgtatgtcaacagaacgcccaagtcaaaca

SEQ ID NO: 4242 - DNA, 287 bp, Glycine max
  Clone ID: 700559210H1
gtcctggtgctgttgctctgcctggtgacatttccaacctgtgtcctgtcccaggtgcagctgaaggagtcaggacctggtctggtgcagccctcacagaccctgtccctcacctgcactgtctctgggttctcactaaccagctacaatgtgcactgggttcgacagcctacaggaaaaggtctggagtggatgggagtaatatggactggtggaagcacagattacaattcagctctcaaatcccgactgagcatcagctgggacacctccaagagccaagtttt

SEQ ID NO: 4243 - DNA, 289 bp, Glycine max
  Clone ID: 700559212H1
ctgattcataggcccaagagcaaagaaactaagaagattttgagcacaatggcatccacacaatgcttcttgcaccaccatgccctcaccactccaaccagagcttcatcacagcgcttagttgtgagcaccaaaccaaaccacattgtttgcaaggcacaaaagcaggttgtccaagagggtgaggacactactaacattgtctctcgcaggttggccctcactgttctcattggtgctgctgctgttggctctaaggttgcacctgctgatgctgcctatggagaag

SEQ ID NO: 4244 - DNA, 289 bp, Glycine max
  Clone ID: 700559213H1
tcaggaagcaatcatggtgctctctgcagatgacaaaaccaacatcaagaactgctgggggaagattggtggccatggtggtgaatatggcgaggaggccctacagaggatgttcgctgccttccccaccaccaagacctacttctctcacattgatgtaagccccggctctgcccaggtcaaggctcacggcaagaaggttgctgatgccttggccaaagctgcagaccacgtcgaagacctgcctggtgccctgtccactctgagcgacctgcatgcccacaaactg

SEQ ID NO: 4245 - DNA, 289 bp, Glycine max
  Clone ID: 700559214H1
gtctttgtgaaaaacccggatggtggaagccacgcctacgccatccacccacttgacttcgtcctgagcctgaagcagcagatcgaagataggcagggccttcaaagccaggagcagcagctggagttccagggccgcgtcctggaagactggtttgactttaaatcctatggcatccaagatagtatcacgatcatcctatccaggaagagggaggggaaagccccatctgcgcccagctagcttcctctgcctcttttgctatctcatcctaaagtcagcctagtca

SEQ ID NO: 4246 - DNA, 290 bp, Glycine max
  unsure (1)..(290): unsure at all n locations; Clone ID: 700559215H1
aattccacagaatatggagacngttcttttcaatcactccccacctttggaattcaagggtttgagcaaggaggaggaagactcattgctagggcaagtggaaatatggaggtacatgacatgcttcacggactccgtggccttgaaagctgtcatagagcttcgtatagcggacatactagaccgttatggtaaaccactatccttgtcgcaaattgtggagaacatagaagacgcaccctccccagatgcctctcttctccagagagtcctgagagtgatggtgcgca

SEQ ID NO: 4247 - DNA, 100 bp, Glycine max
  unsure (1)..(100): unsure at all n locations; Clone ID: 700559217H1
acatgntgatcaccgaccgcatcgaaaacgttgaccacctgggcttcttcatttaccgactatgtcannaccaaggatncctacaaactgcagcgcaggg

SEQ ID NO: 4248 - DNA, 289 bp, Glycine max
  unsure (1)..(289): unsure at all n locations; Clone ID: 700559220H1
ggagaccctctgnctctgcattggtgttcccatctttcagaatcagnacttcagctttctccaaatgtggcatcagggcntccattgccgttgagcaacaaanttcccagactaaggttgctctcctcagaattggtaccagaggaagtccactagctctggctcaggcatatgagaccagagacaagctcatggcatcacatgcagagctagcagaagaaggggctattcagnttgtaataataanaacnactggtgacaanatactatcacagccacttgcagacat

SEQ ID NO: 4249 - DNA, 259 bp, Glycine max
  Clone ID: 700559223H1
gaaaaggcggagaagcctgataaaaaggagcagaaacctgcagccaagaaggctggcggtgatgctactgccccccgggcccggcccgctggtgcggtcaaaaagagtagttctaaggctaaaaagctgaggaagagtaagccccattgcagccggaaccctgtcctggtgagaggaatcggcaggtattcccgatctgctatgtattccagaaaggccttgtacaaaaggaaatactctgctgccaagacaaaggttg

SEQ ID NO: 4250 - DNA, 130 bp, Glycine max
  unsure (1)..(130): unsure at all n locations; Clone ID: 700559224H1
gngtgttgtngttgagtgtcgccgcgttgtgcctctttgcccaatgatncantancagccaanaggcttaatcagtctggnnnagcnagactggagcacactttgtnctggttcggtgcggatnaggttg

SEQ ID NO: 4251 - DNA, 285 bp, Glycine max
  Clone ID: 700559226H1
catgtcaccttcatgcatccaaaacaaaagttctgagcacccagaacaaaacaccaaaacaaaagcctgagctgatgtgaagtgggaagcttcttggagcctttgttcctgatgtctgtcttctgtctgtagttctgcatatgtgttctcagtgttagtgtcaaggtttgctgtcctttgcattacagtgctgcggactcttgtggttttcctaagacaatagtgtacttgattttgtattcggagagagctctcgtacagcggacccttagagaatgtggttgt

SEQ ID NO: 4252 - DNA, 190 bp, Glycine max
  Clone ID: 700559227H1
accaaccaacataactaaacccccacataaactaaaacatttaactcaaaaagtattggagaaagaaattctacttaccaggagctatagagaaagtaccgcaagggaatgatgaaagactaatttaaagtaaaaacaagcaaagattaaaccttgtaccttttgcataatgaattaactagaaaatcct

SEQ ID NO: 4253 - DNA, 288 bp, Glycine max
  unsure (1)..(288): unsure at all n locations; Clone ID: 700559228H1
ancagactctggncctcaggctgtcctggactccaggactggagtcttgagagctccatgggctgcctgctgtcctctaaccagagtgctgctggctggggctccttgggacaaaatgcactcttgttcctctatagtgagcctctaagaggagtgccattaaagcagttctagctggtgagaaggtgggccctgttcttgcctcgagaggatgtcgggtgttaccgcgtagggacagccaccctctggggaaagttggganaaacacagccgcagngggtgcctctt

SEQ ID NO: 4254 - DNA, 288 bp, Glycine max
  unsure (1)..(288): unsure at all n locations; Clone ID: 700559229H1
gtcaganatatatgtttataananaaaaataanaaccctttcnttanccccaacagtgtcgctgctggagaagatcgaatcgaaacgcgaataagtttctntctctctcgttggacgaataatggttctgaggaggaagaagatggagcagcgcttcaccttcttctgctgttgatttcatggccacctcccagtcccagcatcgctgcgttttcgttgggaatataccgtatgatgccacagaggaacagcttatcganatctgccaagaggttggcccagtagtct

SEQ ID NO: 4255 - DNA, 289 bp, Glycine max
  unsure (1)..(289): unsure at all n locations; Clone ID: 700559230H1
atcttggcgtctgatcttggttggggcttgtcccgcacctaaggcaagaggatggtggctgcaaagaagacganaaagtctctggagtcaatcaactctaggctccaacttgttatgaaaagtggaaagtacgtgctggggtacaaacagactctgaagatgatcagacaaggcaaagcgaaattggttatcctcgccaacaactgtccagctttgaggaaatctganatagaatactatgccatgttggctaaaactggtgtccatcactacagtggcaataacattg

SEQ ID NO: 4256 - DNA, 289 bp, Glycine max
  Clone ID: 700559231H1
atctttgtcactgggactccaattcactccatcccaaggcctggtcctcataccgcctgccttcagaggatcagattgaggggctcctgtctctctaaccagcccagcccagggaaaagagaggacttattcttggctgcagttcctaggcccttcctctaagaaacaaggcagactcaggaagcaatcatggtgctctctgcagatgacaaaaccaacatcaagaactgctgggggaagattggtggccatggtggtgaatatggcgaggaggccctacagaggatgt

SEQ ID NO: 4257 - DNA, 292 bp, Glycine max
  Clone ID: 700559233H1
aaataatccaacattcattcttatataatatatatattgtgagttcatgagtgattgttattctttgaagcacggacactccagtcccttgccttgtttggtgtttgacacgacaccgacgcccgtgtctgggttgagtttgatgtgtttgacgggtgttcacgtgtccgtgtccggtgttcgtgtcagtgtcggtgcttcatagttgccgtttgctacaacgaagagatactgagtcaatttctcatagtatatttataattgttgtttgctacaacgaagagataatgtt

SEQ ID NO: 4258 - DNA, 289 bp, Glycine max
  unsure (1)..(289): unsure at all n locations; Clone ID: 700559234H1
gcgagctgagcagttgccatggtcctgggatctgctgcactattcgtcttgagcctgtgtgtcactgagctgaccctccatggctgctgacacctgcccagaggtgaaggncctggatctggagggctccaacaaactcaccatccttcaaggctgccctggcttgcctggagccctggggcccaagggagaggctggtgccaaaggagatagaggagagagtggccttcctggacaccctggaaaggcggggccaactggacccaaaggagaccgaggagagaaggga

SEQ ID NO: 4259 - DNA, 286 bp, Glycine max
  unsure (1)..(286): unsure at all n locations; Clone ID: 700559235H1
anacctncattnntcncattcacggctataaatnatctcaaaaacccttccanaccctcacttcgccttccgcttccggcgncanatcgngtatnnttctctgttctattcctacgatggagttttngggtgccgaggttaaggttggtgagtctgttaaggtagatccagccgaattcgaggcatgcatacacctttctcaggctgctcttggtgangcaaagnnagannnatcaaatgaaccagttgttctctacttganagttggtcaacagaaatttgtctt

SEQ ID NO: 4260 - DNA, 104 bp, Glycine max
  unsure (1)..(104): unsure at all n locations; Clone ID: 700559236H1
tctccntgnantngtntnngtggagtgtcgaacacaaatggtgagaatttagaattggtcccncttattatcantattgaaattaagtgctacttaattcnatt

SEQ ID NO: 4261 - DNA, 286 bp, Glycine max
  unsure (1)..(286): unsure at all n locations; Clone ID: 700559237H1
cgccggcaagatgggtaagtgtcgtggtctccgtactgcccggaagctccgcagtcaccgacgggaccagaagtggcatgatanacagtacaagaaagcccacttnggcacagccctgaaggccaatccgtttgggggtgcctctcacgcaaagggaattgtactggaaaaagtaggggttgaagccaaacagccaaattctgccatccggaagtgtgtcanggtgcagctcattaagaacggcangaagatcacagcgttcgtgcccaatgacggttgcttnaac

SEQ ID NO: 4262 - DNA, 286 bp, Glycine max
  unsure (1)..(286): unsure at all n locations; Clone ID: 700559238H1
gctgggaatctcagaactgtgtacttccagctgggttgaggaaggcagagaggctaagggatgctccncagagggaacgtactgcccttgtttcataaatcaccctggccggaaaaaatgagccccaccggaaccttgcaaaactttccctttgtgtttgtctgctcgttgatattccagctcactatgcaagttgtgaggacaagaggccagaggccaaggacccaggaggctccggcaggacgttccgtagctgtgcctcatccctggccctgagttcgataaa

SEQ ID NO: 4263 - DNA, 288 bp, Glycine max
  unsure (1)..(288): unsure at all n locations; Clone ID: 700559240H1
aaagaaacttcctacggcctgtctttcttcaagccacagcctgggaacttcgagaaaaacttctcggtaaacttatataaagttaccgggcagttcccatggagctcacttcgggagacggacagaggagtgtctgctgagtacagttttccactatgcaagaccagtcacactgtcatctgggagggtgtgtggcgggaactgggctgnctcgcgcggactgcgtcattcgctgtgcggaaggaaagtggacactcattgaagtcgtctctctcgcatgccatggtc

SEQ ID NO: 4264 - DNA, 286 bp, Glycine max
  Clone ID: 700559241H1
gcctgcaaaggttaattaaaaactgttttgcagccaacaagcgccgggcttcagtgatttaataatggaatatttattattctgttatgcaaatacatttattgggtaactgctttggttgagtatgtcttgctcagcgtggctactatgtatccttctagaaattttataagatgaaaagagattttttttaaatgaacatcgtgtcattttagacggtgctctaagcctccatcttttttttttcttccacagcaattgaacaagagaagcaagctggcgaatc

SEQ ID NO: 4265 - DNA, 283 bp, Glycine max
  Clone ID: 700559242H1
gaaaattcagtgctgaaacatggcttcggctactctctctgtagccaaaccagcccttcaggcaaatgggaaaggcttctctgaattctctggcctccgaagctcatcaggcttccttcccttttctagaaaatcttcagaggatttccattctgtcattgccttccagacctatgcagttggaagcagtggaggatacaagaagggtgtgacagaagcaaaactgaaggttgccataaacgggtttggaaggattggaaggaattcttgaggtgctggcagg

SEQ ID NO: 4266 - DNA, 286 bp, Glycine max
  unsure (1)..(286): unsure at all n locations; Clone ID: 700559243H1
ggcttctganatagtgaanctaacgaagnaaagatgtcgtccatgcngcgcttnnctnnctcgtntcctcagccccgaaggcctcaattccctcgcccattcannnnnnnnnnnnnnnnnnnnnnnngagcctccgccgccgtcgtggccgtctcctcctccgaccgctcctttctccggaatgctctgaattccttcttctcttctgacctatcaatgcctctctggggttcactgagtttggccgacagtggggtttccgtggttgagtcaaaaaccggaactt

SEQ ID NO: 4267 - DNA, 288 bp, Glycine max
  unsure (1)..(288): unsure at all n locations; Clone ID: 700559245H1
aaaaccctctctttctctctcttccaaaacctaattttcattttttctcttcaaacaaattttcaaaatgcgtgagatccttcacatccagggtggccaatgcggcaaccagatcggcgccaagttctgggaggtggtttgcgcggagcacgggatcgaccccactggaaggtacggtggggactcagagcttcagctcgagaggatcaatgtctactacaacgaagccagctgcggccggttcgtgccgcgcncggttctcatggacctcgaaccgggcaccatgga

SEQ ID NO: 4268 - DNA, 287 bp, Glycine max
  Clone ID: 700559246H1
gccatcaggtgagccaagatgggtgcatacaaatacatccaggagctgtggaggaagaagcagtccgacgtgatgcgcttccttctaagggtccgctgctggcagtaccgccagctctctgcgctgcacagggctccccgccccacccggcctgataaggcgcgaaggctgggatacaaggctaagcaaggttatgtcatttacaggatccgtgtccgccgcggtggtcgcaagcgcccagttcctaagggtgcaacctacggcaagcctgtccaccacggtgttaa

SEQ ID NO: 4269 - DNA, 289 bp, Glycine max
  unsure (1)..(289): unsure at all n locations; Clone ID: 700559248H1
cgccatcttccttgagactcctgcgccatgagagcgaagtggcggaagaagagaatgcgcaggctgaagcgcaagagaagaaagatgaggcagaggtccaagtaaaccatcttgtgcacccacgaagcctgcgggagcagaagtaagggatgctgaagcccggaacaagtggttggactgtatgctgctgtcggtaataagtctcagtagacccggaatgtcacctcgccgagatcagctgggaaaatgactacctncctcacaaccaaaacagtcccgctggccctct

SEQ ID NO: 4270 - DNA, 288 bp, Glycine max
  unsure (1)..(288): unsure at all n locations; Clone ID: 700559249H1
caccatgaagctttgagtgaagctctgcctggggacaatgtaggcttcaacgtaaagaacnatanantcaaagacgttagacgtggcaatgttgctggggacancaaaaatgacccaccaatggaagcagctggcttcactgctcaggtgattatcctgaaccatccaggccagatcagtgctggctatgcccctgttctggactgccacacggcccacatagcatgcaagtttgccgagcttaaagagaagatcgatcgtcgttctggtaagaagctggaagatggc

SEQ ID NO: 4271 - DNA, 287 bp, Glycine max
  unsure (1)..(287): unsure at all n locations; Clone ID: 700559250H1
caaaaactcccgttttctctctctgtttttccatggccatctgatcaaactnttcttgattctctctctcagtttttgctattctgagtgatgggtatgccctgccgctgttcccacacctcccacatcactgaaatcatcatcaccagcttcttccgccacaagtcttaaattacaacaatttccctcaattattcatcaaccaaccaccttaatagccttttccaatggttccttaaagatccaacttggtcggagtaaacatggcggctagtggaagttccttt

SEQ ID NO: 4272 - DNA, 284 bp, Glycine max
  Clone ID: 700559251H1
agagacagagacatagagactatcttgtgctagctatgatggcggtttatgcctataatcttggtacttggaaggactgaaagccaaggacagtgtaggctacaaacaaacagacctttcttggtaactgagaacagagctttccaaggctagccctgtgctgagcctgaggtaaagttgactgagaacagagctttccaaggctagccctgtgctgagcctgaggtaaagttaacttcaaccacatctggtggctgaggactgggaatgatggttctcaaagg

SEQ ID NO: 4273 - DNA, 276 bp, Glycine max
  unsure (1)..(276): unsure at all n locations; Clone ID: 700559252H1
gtttgttgtgagctataagctagtttatcgtgaggagaatatgaagttgtttgtttnctttgttgctgcagtagttttggtagcatggccatgccatggcgcaggctaccaaaggttccctctccgaatgaaaactggctatggtgagcgttcttcggaggtaaaatgcgcaagttttaggcttgctgtggaagcacacaacatccgagcctttaaaaccattcctgaagagtgcgttgaaccaacaaaggactacattaatggcgaacaatttag

SEQ ID NO: 4274 - DNA, 94 bp, Glycine max
  Clone ID: 700559258H1
aataagtggtggcttggtagttattcccgtccatttctctaatgctgcctaataatttaaaggagttaatccaggccaatgaataccaaaaaaa

SEQ ID NO: 4275 - DNA, 214 bp, Glycine max
  Clone ID: 700559259H1
gacatgaaagtgggaagagactagttgggaaaataaagggtcgtcaggagtcggaaggaggtaagatataggaactgcacatgagcacactacattgtatacatgctggaactgtcaaaagtgttctaaaacccctacaaatatgccgtactaagtcactgaattgtataagtgggcaaatgtatactatgtaaactatcaataaagaatttaa

SEQ ID NO: 4276 - DNA, 284 bp, Glycine max
  unsure (1)..(284): unsure at all n locations; Clone ID: 700559260H1
aaagacccatgaaaatccttcatnccggtgactgaaggttgagatgcacagacagttgcctggaaaataccanaatcctacaaggggaaaagcaaaattgttttgcttcactctttatggggaagggtttgaatagcttttcttagttgctcaatagatggtgtcaacaccgtgtcacaggccggcctgtgggtgtgggcagtgctggggagctgatttccatgaagtataactggggagaggcttgtcaatgccaacactgtgggctcttgtttgacttgggg

SEQ ID NO: 4277 - DNA, 286 bp, Glycine max
  Clone ID: 700559261H1
tttccctcgtggtccatatgatatgagggaacctggtattccatatcagaatcttaatgtccaacgatctcctcagatccactctcagttgaatcacagtggtccaatgtttaaccaactggattctcatcctcctcatataagttcttatatgaagcttccaactcctgagagcatggttcatcatgactcaccaccaaatcatcaatttccaggaaatatgcttcgtcctcctttccatcaaacaaacaatggactagcagggtttgatcctcccgttcatcat

SEQ ID NO: 4278 - DNA, 286 bp, Glycine max
  unsure (1)..(286): unsure at all n locations; Clone ID: 700559262H1
gatctcttggccatcaatttgtcctccatccatgtgtttcagtgccttctctgcttcatccggattctcgaattccacgtacgcatagcctttggatagatgaggatgcatcctttccacaggcatgtcaatcattttaattttcccgtaagtagaaaatatttccatgatatgatccttggtcacattcctggtgagcctcccaatgtgcactttggtgggtttaggtgaagggctccgccttttcctctcttnttcatctcttttaggtggttnggatttggag

SEQ ID NO: 4279 - DNA, 286 bp, Glycine max
  Clone ID: 700559263H1
atccaccttttggggagaccaccggagatatgtacggacggagtgattcttacgaatccgatttggcgcttctggattcgattcgccgccacttgctgggagagtccgaattgatattcggagccccgaatttcggttcgggtcggagctccagtttcagcagcttggactcgtgtttgagtgatgattggggagagcttccgtttaaggaggacgattcagaagatatggtgttgtacggcgttctccgtgacgcagttaatgtggggtgggtcccatccctcga

SEQ ID NO: 4280 - DNA, 289 bp, Glycine max
  Clone ID: 700559264H1
gaaaagcagattaatacttttgcaaagaaggcaaatgatggatctttatcaattgatgagatggctggaggcactcttacaatatccaatggtggtgtttatggaagccttttgagaccccctattatcaaccctcctcagtctgcaatcttgggtatgcattccatagtgagccgtccaacggttgttggaggaaatattgtcccaagaccaatgatgtacgtggctctaacatatgaccacagaattattgatggaagagaggccgtgttctttctgcgacgcatca

SEQ ID NO: 4281 - DNA, 290 bp, Glycine max
  unsure (1)..(290): unsure at all n locations; Clone ID: 700559265H1
gctttccgttccggttcaaaaatcgcgaaggcatttgacgccgcagcaacgaaaacacgaaaataactgcacagcataagcttgtagaattgtactgcatcgcanagccccatgttgatcgtgttcatttgcatcttccttttcttcatctttctttacaagttcctcatcgcttatggcgatttcactttgatgtctaagaagcaacctaagcgccaagagattgaagataaggttgtttggattactggtgctagccgtggaattggggagattctggctaaacagtt

SEQ ID NO: 4282 - DNA, 286 bp, Glycine max
  Clone ID: 700559266H1
cagaaagcaagctcatcctagagttttaaaaatggcagcagcctcctccatggctctctcttccccatccttggctggcaaggccgtgaagctgggcccatcagcccccgaagtcgggagggtcagcatgaggaagaccgtcaccaagcaggcctcctccggaagcccatggtacggcccagaccgcgtcaagtacttgggcccattctctggcgagcccccgtcctacctcactggcgagttcccaggtgactacggctgggacactgctgggctttcggccgac

SEQ ID NO: 4283 - DNA, 284 bp, Glycine max
  unsure (1)..(284): unsure at all n locations; Clone ID: 700559268H1
gtactctcgccatccaccggagaatgggaagcccaacttcctcaactgctacgtgtctcagttccanccacctcagatagaaattgagctactgaagantggaaagaagataccaaatatcgagatgtcagatctgtccttcagcaaggactggtctttctacatcctggctcacactgaattcacacccaccgagaccgatgtatatgcttgcagagttaaacacgtcactctgaaggagcccaaaaccgtcacctgggaccgagacatgtaatcaagctcta

SEQ ID NO: 4284 - DNA, 285 bp, Glycine max
  Clone ID: 700559269H1
catgaatttggaaacgcaaccaggaacggcgtcgtattggtgctacagctgcacccgtttcgtgcacctctctgtccaaagcaccatcgcctgcccccactgtcaaagcggtttcgtcgaagagatccgtgccggcgccggagccgaagcctcgccacgccatcgactaagtcctttccccgatgatcctcttttgctccggcgacagggcttccgccgccgtaggagagaagcttccggcaaccgctccccgttcaaccccgttatcgtcctccgcggccccgg

SEQ ID NO: 4285 - DNA, 285 bp, Glycine max
  unsure (1)..(285): unsure at all n locations; Clone ID: 700559270H1
cacacatcttctcancccagatggggaacctatagccnngcnanatntngntaanacnaaagtccaaattgatcaactantggcttnnannggggttnctnactggaatgtggatgaggggttccttacaggancagaaatgantcaaagacagcngtattaccnaaanccatccnccaccttgggtgncanctcncaantgccgagnacctagagcatactgcatagcctgcaggcagctcaacaggntggaggctgnccnntccangcacctaccccagttgg

SEQ ID NO: 4286 - DNA, 284 bp, Glycine max
  unsure (1)..(284): unsure at all n locations; Clone ID: 700559271H1
gcctaaagcgcaactaatgttagtgaaccccactttcgcggtaggaaggctttttgtgtgcagacaagtccttcttttgaatttatgangccacaaaaatgagtcccgcaatgtgcatgtggcctttaacaatgaaagcagagtgactgggatagtgacaagtatctgtaatcccaggattgcaagggttganatgggagggtcacaggctcanagtggagactaaaagcatgggaatgctttaacaaggaaagggaagatgagaatccatctgtagcagccca

SEQ ID NO: 4287 - DNA, 286 bp, Glycine max
  unsure (1)..(286): unsure at all n locations; Clone ID: 700559272H1
ctcttttgctgcatcagaggagttgtaaattaagagcatggctgcacaagctcttgtatcatcatcttctcttaccttctcagcggangctgcaagacaaagtcttggancaagatcactccaatctccatttggcttctccagaaaagcctcctttcttgttaaggcagctgctaccccccctgtcaagcaaggatcagacagacctttgtggtttgcatcaaagcaaagtctttcttacttggatggcanccttccgggtgactatggatntgancctctggga

SEQ ID NO: 4288 - DNA, 282 bp, Glycine max
  Clone ID: 700559275H1
accaagtcttggagcgttggtacccttctgtagaagaagggaacaacaagggcattgtggtgcttgtcacgagtcagaaagaaggagcagtcactggtggcccggcttttgtcgaagctgtgggggaaaagatccttgatgctaccgtctcagagaacctcccagtattggctacggatgagaagtacaatgaagctatttttagcactgctaaacggctagcggctgccatagatgggctttcggatcctggtgggccaacagttaaagacaacaaacgtg

SEQ ID NO: 4289 - DNA, 263 bp, Glycine max
  unsure (1)..(263): unsure at all n locations; Clone ID: 700559276H1
attatgaggaggctgagagatgganccgttaatctcatccggngctcaaagcttgatgccaanattgactccgaaactggagcagttatcatggaacctaatcatctaaatgtgtatgaacaactgatagaccataccaaggcccttaacggacgcacttacaagttggttagtcaacttctggaacatgcacaagctcaaacaacacgatgattgtgtaggtagatcaatgagagtatttgtnttatctatccggatgcatc

SEQ ID NO: 4290 - DNA, 287 bp, Glycine max
  unsure (1)..(287): unsure at all n locations; Clone ID: 700559280H1
ctgtgttcctgtttttgttcttcgatggcggcaacctcaacatcactggcttctcaactctacattggcctgcgccgcccctgcctcaagctcgattctttcaattctcaatctttcnctctcttcgaccctaatcttcgcctatccctctctccacccaaaccctcacgcgccgtcatcgccatggccggcaccgggaagttctttgttggtggcaactggaagtgtaacgnaacaaaagactcaatcagcaagcttgttgctgacttgaacaatgcaaaattgga

SEQ ID NO: 4291 - DNA, 130 bp, Glycine max
  unsure (1)..(130): unsure at all n locations; Clone ID: 700559281H1
cacaggtgtagaggtcagagggtnncactgcggnattagttctttccttcttcctttacctgggtccnggggancaanctcangttgcngccttgnatagcaagtgcctgggcctgcgttctagatcgcg

SEQ ID NO: 4292 - DNA, 79 bp, Glycine max
  unsure (1)..(79): unsure at all n locations; Clone ID: 700559282H1
ctagctagtacttaacataatgcagtgagattcacactcccaacgnttcctctttctcccttaantatcttcntncatg

SEQ ID NO: 4293 - DNA, 281 bp, Glycine max
  unsure (1)..(281): unsure at all n locations; Clone ID: 700559283H1
ttaagatgacttaagtttcatcttaaatttntttcattccctgtagttaattctgcatgtactagtcttagaagtaaacacaagctaaaacaacttgacaggaattccccaagtggcttgttttccaaagtactgagaacaaaaccctaagttcccctaggtcttgtaactcagcaaggcttgtgaatgtgaaaataacagtgcccaatcacattctgctttaaaaaggtaaatacagatgagatanaangaaananaaaaganacacgnannannngaag

SEQ ID NO: 4294 - DNA, 283 bp, Glycine max
  unsure (1)..(283): unsure at all n locations; Clone ID: 700559287H1
ctataagctagtttatcgtgaggagaatatgaagttgtttgttttctttgttgctgcagtagttttngtagcatggccatgccatggcgcaggctaccaaaggttccctctccgaatgaaaactggctatggtgagcgttcttcggaggtaaaatgcgcaagttttangcttgcgtngaagcacacaacatccgagcctttaaaaccattcctgaagagtgcgttgaaccaacaaaggactacattaatggcgaacaatttagatcagactctaaaacagtta

SEQ ID NO: 4295 - DNA, 263 bp, Glycine max
  unsure (1)..(263): unsure at all n locations; Clone ID: 700559288H1
gctcgctcggtgaccgtgatctttctggtgcttgtntctctggccgtcgtgcttgccattcagaaaactccccaaattcaagtgtactctcgccatccaccggagaatgggaagcccaacttcctcaactgctacgtgtctcagttccacccacctcagatagaaattgagctactgaagaatggaaagaagataccaaatatcgagatgtcagatctgtccttcagcaaggactggtctttctacatcctggctcacactgg

SEQ ID NO: 4296 - DNA, 185 bp, Glycine max
  unsure (1)..(185): unsure at all n locations; Clone ID: 700559289H1
attcatttgatactgtgacatgttcccttgattatactttgttaaagtagacctgtccatcatggatctggctgccagcagccatgctgcaaaatcnttgatgacagtccctgcttgttgagtctctgctctcagactagagcaatcacaggacactggtgtgtggaagtgccctgtcacatcat

SEQ ID NO: 4297 - DNA, 100 bp, Glycine max
  unsure (1)..(100): unsure at all n locations; Clone ID: 700559290H1
tgngatctgttanggtgctcagaaggtantggaaccgggctcccggaagtatggagtctnccntatngggacacagtntaccccgtgtcagcnactcccg

SEQ ID NO: 4298 - DNA, 285 bp, Glycine max
  Clone ID: 700559293H1
attcacactgctgataaacttgttattagtgagctgaaaaatctgtctgaactcaagcatttcctacagggagaacaacccaaaaccagtgtgtgtttctccccaagactcacgtttagctgcagaaattcaagaacaacagagccttctgaaaacttatgaggtcatggtgaagaagttccaatctgaaatccagaataaagattcagagatccatcaattacagcagcagattgaggaggctagccagaagcgagcaaaactagagaaaaatctgaagcttag

SEQ ID NO: 4299 - DNA, 284 bp, Glycine max
  Clone ID: 700559294H1
gctttttaaattaatcgtgtttttacttaattagatactcttctatagcaatgatttccaactctggcttacataagaattgctggggaagtttgaagggggaaataaaagccccgaggtgcagtccaggctttgatagtttttaaaattcaccagtgttgagaaagaagtgagtttagaaataggcatcctaaataatgacatcactgatttcagtggccacaattactctgctgtgctcttttggatactgcagctgccttatagagacttagtgagttttg

SEQ ID NO: 4300 - DNA, 287 bp, Glycine max
  unsure (1)..(287): unsure at all n locations; Clone ID: 700559295H1
aattaagatgacttaagtttcatcttaaatttttttcattccctgtagttaattctggcatgtactagtcttagaagtaaacacaagctaaaacaacttgacaggaattccccaagtggcttgttttccaaagtactgagaacaaaaccctaagttcccctaggtcttgtaactcagcaaggcttgtgaatgtgaaaataacagtgcccaatcacattctgctttaaaaaggtaaatacagatgagatanaanaaaaaaaanaaganaaanaanaagnngnanannc

SEQ ID NO: 4301 - DNA, 303 bp, Glycine max
  unsure (1)..(303): unsure at all n locations; Clone ID: 700559301H1
ctttctcttcaacgaggcggccgagcggcagacgccaacatgcagatcttcgtgaagaccctgacgggcaagaccatcactcttgaggtcgagcccagtgacaccatcgagaatgtcaaggccaagatccaagacaaggaaggcatcccccctgaccagcagagactgatctttgctggnnaacagctggaggatggccgcacctgtccgactacaacatccagaagagtccacttgcactggtgctgcgtctncgcggtggnatcatcgagcngtcccttngtcagntgcccanaagtanaa

SEQ ID NO: 4302 - DNA, 299 bp, Glycine max
  Clone ID: 700559302H1
attttataagtgttaattcttgattttgatattggtacaaataaaactatatatacataggtcaaaaagagttatacagtgtaaaaccaaagaaatcaatgaatttttgcaccaaaaaagtgtgggaaatatttttaaagacatgaaacccaagaagacagtgcagtcgttaatgtttcctttattggtctgtagtaacttcaagttcattctatgggacatgcttctgtcacagggctttgttgacttcattcatctcctgggaatggtaagcatcagtatctgacaataaagcatat

SEQ ID NO: 4303 - DNA, 300 bp, Glycine max
  Clone ID: 700559303H1
gcgggcccgaggggaggagctggacgaggatctgttcctacagcttactggagggcatgaggccttctaaagacagcccctgctctacccacaccctccagggactctcccatggccacgcccacctgaactctcccagcatgcaccctgctgggcaccctcacttgtcctcaggtaggccagggccctcactggggtagatgctaccaccacccagcctagggacgatgggccctgagccacacgaagcccctcctcttgccctattggcacaagctcacacccttgactatatgtagt

SEQ ID NO: 4304 - DNA, 298 bp, Glycine max
  Clone ID: 700559307H1
ggaatgatgagaagcagctccaagacatgtatcttagcagaaagtcttttgcttttgattctgatgcccctggtgctggcatgactgagaaaagaaaagtcttcgagatggctctgagcacagcagatgccacattccaaaatcttgattcatcagaaatttccctcactgacgtcagtcattactttgactcagacccgactaatctggtacaaaatctaaggaaagatgggaagaagcctagtgcatacattgctgatacaaccacagccatgctcaggtacgtacactttctgag

SEQ ID NO: 4305 - DNA, 286 bp, Glycine max
  unsure (1)..(286): unsure at all n locations; Clone ID: 700559308H1
ggcagttctcttctctgnttacganattttttcagcaaaagcaggcaatggacttcttttttaagggantgaacagggatggatctgagtgtccctttgatgtgaaagacatccaacggtgtccgtttttaagaaacatcaatgaacctacaaacttctctttctcctcaactaaantctccattcctgttcatggatccaagggtcctatatttgaagaggtcctagttttggcatggcattaagctatttcatggganggatggagtcatcccctatctgagaa

SEQ ID NO: 4306 - DNA, 294 bp, Glycine max
  Clone ID: 700559311H1
gcctcgatgtgaaattcctgaacaaccacagcctggtaaaggacgcccaggagaaggccaacgccgccctgctggattacaccttgtgtcactacccacactgcggggacaaattccagcagttgctattgtgcctggtggaggtgcgggcactgagcatgcaggccaaggagtatctgtaccataagcatttgggcaacgagatgccccgcaacaaccttctcattgagatgctgcaggccaagcagacttgagcctgggtgccaggcagcgggcagtaggcagggatgccat

SEQ ID NO: 4307 - DNA, 296 bp, Glycine max
  unsure (1)..(296): unsure at all n locations; Clone ID: 700559312H1
agccacccagcccggcaatggtcctctttgtggagctggtccaggtatttctanccataatgagcttcctgggtccccggggagtatgggccatcaaggccgaccacatgggctcctacggaccagccttntaccagtcttacgacgcctctggacagttcacacatgaatttgacggggaacagattttctctgtggatctgaagaagggggaggtcgtgtggcgtctgcccgagtttgcagacttcgcgtactcggactttcagagcgggctgatgagcatctccatgatcaga

SEQ ID NO: 4308 - DNA, 295 bp, Glycine max
  Clone ID: 700559313H1
agcgcttagttgtgagcaccaaaccaaaccacattgtttgcaaggcacaaaagcaggttgtccaagagggtgaggacactactaacattgtctctcgcaggttggccctcactgttctcattggtgctgctgctgttggctctaaggttgcacctgctgatgctgcctatggagaagctgccaatgtgtttggaaagccaaagacaaacactgacttccttccatacaatggggatggattcaaactctcaattccctcaaagtggaacccaagcaaagaggttgagtacccagg

SEQ ID NO: 4309 - DNA, 297 bp, Glycine max
  Clone ID: 700559314H1
tgcagtcccatcttcaattgttcatcaaagtacaaactcttcattcaatggtcaaacattacacctggccgtgtttaaggttacctgtgctaagacaaaatactcccatggcacatgcctgttatcatgatggtcaaaccaaaaatacagttcatccagggaactgatgaacaaacaatacccgatgtgaggctgaccaaatcaagggatggaacaaatggcatggctatcttcacatttgatcaaccctcagttttcgattcttcgggtgaaataggcgatatcactggattttat

SEQ ID NO: 4310 - DNA, 301 bp, Glycine max
  unsure (1)..(301): unsure at all n locations; Clone ID: 700559315H1
gcctcanccgctgccgccgccactgctgctgcaggatccgccgcagccaccagttctcgcacgtcgtcgctccctccttggacagtaattttatgaataagcatcagaagccggtactaacangccagcggttcaaaacccggaaaagggatgaaaaagagaaattcgaacccacagtcttcagggatacacttgtccaggggcttaatgaagctggtgatgaccttgaagctgtagccaaattcttggactctactggctcacgactagattatcgtcgctatgcagacacactctttga

SEQ ID NO: 4311 - DNA, 299 bp, Glycine max
  unsure (1)..(299): unsure at all n locations; Clone ID: 700559316H1
acaaatcaaagccatggccacctccaacttctctattgttctctccgtctccctagccttctttttggtgctacttaccaaggcacactcgaccgataccgtttctttcaccttcaacaagttcaacccagtccaaccaaacattatgctccaaaaagatgctagtatttcatcctctggggtgttacaactcaccaaagttggcagcaacggcgtgcccacctcgggatctctcggtcgtgcntttacgctgccccaatccagatttgggacagcgaaaccggcaagtagccagtggg

SEQ ID NO: 4312 - DNA, 304 bp, Glycine max
  unsure (1)..(304): unsure at all n locations; Clone ID: 700559317H1
gcgagaatgaagaccattctcagcaatcagactgtcgacattccagaaaatgtcgacatcactctgaaggggcgcacagtncattgtgaagggccccagaggaactctgaggagggacttcaatcacatcaatgtagagctgantcttcttggaaagaaaaagaaaaggctccgtgttgacaagtggtggggtaacaggaaggaactggccactgtcagaaccatctgcagtcatgttcagaacatgatcaagggtgtgacactgggcttccgttacaagatgaggtctgtgtatgctcacttc

SEQ ID NO: 4313 - DNA, 302 bp, Glycine max
  unsure (1)..(302): unsure at all n locations; Clone ID: 700559318H1
ttgagactcctgcgccatgagagcgaagtggacggaagaagagaatgcgcaggctgnaagcgcaaganaagaaagatgatgcagaggtccaagtaaaccatcttgtgcacccacgaagcctgcgggancagaagtaagggatgctgaagcccggaacaagtggttggactgtatgctgctgtcggtnataagtctcagtagacccggaatgtcacctcgccgagatcagctggganaatgactaccttcctcacaaccaaaacagtcccgctggccctctgccctggacctttggcattctg

SEQ ID NO: 4314 - DNA, 101 bp, Glycine max
  unsure (1)..(101): unsure at all n locations; Clone ID: 700559319H1
aggacagtgggaatgctcgttgcatgccnttgcatgncggcgtgcactnnttaggatgancgagggcattnggnctaaccttgaagatgagtanntagtta

SEQ ID NO: 4315 - DNA, 293 bp, Glycine max
  unsure (1)..(293): unsure at all n locations; Clone ID: 700559320H1
gcttgaggaagcttgagagcctgttggggagnttaaaagatgagaggctgaggggctcggttgacctgcgtatgtttgctttgagcactgcgggnccgaccaacagctcaccatgttcctggcgcgnctgacttcacagctggtcaggagtgntgttccctgggcaggtttcagtcgntcctggcctggctctggggtgattggaagccatgcttttcgacncctttacagtttgcagcctgcaagcccaagtcgggctgcctccctccctggtnagaaggnccattagagnt

SEQ ID NO: 4316 - DNA, 295 bp, Glycine max
  unsure (1)..(295): unsure at all n locations; Clone ID: 700559323H1
cttgatgacactgcngctgntggacttctgtttgagcatcctnnccctgtgcagctcctatatggaagtggcccacctaccttaacttcaagtccatgaaccacatgaattacctgccgagtcaggagggcatgccacgnagccagttcatcaacatgntgntcatcnttncagtggcctttatnaccgtgctcatcctgaaggtctacatgttcaagtgtgtttngactgctacagattcntgaagcacatggattcggccgtggaggacagcagttncnagctgttcctacag

SEQ ID NO: 4317 - DNA, 296 bp, Glycine max
  Clone ID: 700559324H1
gttcaaggaccccaatgcccccaagaggcctccttcggccttcttcttgttctgttctgagtaccgcccaaaaatcaaaggcgagcatcctggcttatccattggtgatgttgcgaagaaactaggagagatgtggaacaacactgctgcggatgacaagcagccctatgaaaagaaggccgccaagctgaaggagaagtatgagaaggatattgctgcctacagagctaaaggaaaacctgatgcagcgaaaaagggggtggtcaaggctgagaagagcaaaaaaaaaaaaaagg

SEQ ID NO: 4318 - DNA, 294 bp, Glycine max
  unsure (1)..(294): unsure at all n locations; Clone ID: 700559325H1
aggactgtgtgctagtttctggttcttccagtagaagcctcctggtaatcattgcaactgctacaatcttttccatagttgctgaaccctcattgaaatgcagatggtaatctccaagctgcttgtcagtccatctctgaattggtgttaagaaagactgtaagaaagacatatctcgttcgccttcaaccttagantgcaagcttttcaagtgcaacctctcttgttggcctctttgctccatcagtggtattttatttaattgctcaagagcatgcagcaaaaccccatgct

SEQ ID NO: 4319 - DNA, 187 bp, Glycine max
  unsure (1)..(187): unsure at all n locations; Clone ID: 700559326H1
aaccaaccaacataactaaacccccacataaactaaaacatttaactcaaaaagtattggagaaagaaatttacttaccaggagctatagagaaagtaccgcaagggaatgatgaaagactantttaaagtaaaaacaagcaaagattaaaccttgtaccttttgcataatgaattaactagaaaat

SEQ ID NO: 4320 - DNA, 253 bp, Glycine max
  unsure (1)..(253): unsure at all n locations; Clone ID: 700559327H1
agatcgggaacgggagcgggagcgagaaaaagaganagacaagaaaagagacagagaagaggatgaagaagatgcatatgaacgaagaanacttganagaaaactgcgagagaaagaggctgcgtatcaagagcgccttaagaattgggaantcagagancgatagcannctagggantatgaganggaggcggaaagagaagaagagagcagaagagaaatggctanagangctacacgattaanagattcc

SEQ ID NO: 4321 - DNA, 292 bp, Glycine max
  Clone ID: 700559328H1
aacagactctgggccctcaggctgtcctggactccaggactggagtcttgagagctccatgggctgcctgctgtcctctaaccagagtgctgctggctggggctccttgggacaacatgcctcttgttcctctatagtgagcctctaagaggagtgccattaaagcagttctagctggtgagaaggtgggccctgttcttgcctcgagaggatgtcgggtgttaccgcgtagggacagccaccctctggggaaagttgggaaaaacacagccgcagtgggtgcctctcagcc

SEQ ID NO: 4322 - DNA, 293 bp, Glycine max
  unsure (1)..(293): unsure at all n locations; Clone ID: 700559329H1
gtccttcattagagtgacatcgtctttaaaccccgcgtggcaatccctgacgcaccgccgtgatgcccagggaagacagggcgacctggaagtccanctanttccttaagatcatccaacttttggatgactacccaaantgcttcattgtgggagcagacaatgtgggctccaagcagatgcagcagatccgcatgtccctccgcgggaaggctgtggtgctgatgggcaagnacaccatgatgcgcaaggccatccggggccacctggagaacaaccccgctctggagaag

SEQ ID NO: 4323 - DNA, 293 bp, Glycine max
  Clone ID: 700559330H1
cttagtgttggtggggttaggggtaagtggtcactttccaggtcttcagtagattatgtcatggagtaggggtaaggggttctggtgggtgggtcctgtgatctgagagcataggccctaagtagcattgtgggacccagtactaagagtattcctggtagatttgactcacattcattctaatagtgaactcttttgtgttttgcctcttgtagtctgatatccttttgggcattctggacaagttggaccctgtcatgtttttcaaatgtccttccccagagtctgctaat

SEQ ID NO: 4324 - DNA, 297 bp, Glycine max
  Clone ID: 700559331H1
cgaggaacaagccctggtgatcgaggagcagctgcgaagggcggcttacctgaacatgtcagaggacccctctcatccgtctatggcccttaacacccgttttgctgaggtggagtgtttggcagaaagtcaccagcacctgtccaaggagtcgatggcaggaaataagccagccaatgcagtcttacacaaagtcctaaaacagctggaagaactgttgagtgacatgaaggctgacgtgacacggctcccagccaccatgcccgcatccccccagttgctgtgaggttacagatg

SEQ ID NO: 4325 - DNA, 302 bp, Glycine max
  unsure (1)..(302): unsure at all n locations; Clone ID: 700559332H1
ttaacacaccaaccccacatccaaagcttcagttcaatatggncaaccttgtcaagttttgctcctttggccattctaagtttanttctagtaattagtgccattgtctttgaggctgaagctaggccaaggacattctttgtatttggagattcacttgttgataatggaaacaacaattacttggctaccacggcacgtgccgatgctcccccttatgggattgattaccctccaagtcatagaccaactggtcgtttctccatggctacaacattcctgatcttatcagtcaacgactt

SEQ ID NO: 4326 - DNA, 303 bp, Glycine max
  unsure (1)..(303): unsure at all n locations; Clone ID: 700559333H1
gatcgatttccctttgtgcttagatggaaaggaaaacaaagtggccctactgcaaatcgtgatgtagttttctatcggaaggctctggattccctaaaaccatgtgatgtggagtggctaccataccgaaacatggacagcatggtaattccagaacatatcanaagcactttaattcttgggaggtcanagacaatgctgatttgctttgacaagggcagaaagacatcttccaaatcgatgcttaaggcaatatggcatgcttcaatcaattccggatgatgtggagcgttgggagaggaa

SEQ ID NO: 4327 - DNA, 297 bp, Glycine max
  unsure (1)..(297): unsure at all n locations; Clone ID: 700559334H1
acgaatactactacaagggaaganaaacttagctactaaggaaggatcaaagagaatggctcaagcaatggcatcaatggctggcttgcgtggttcctctcaggctgtgttggaaggtagccttcaggtgagtggctccacacgcttgaatgtggggagtggaagcagggtggcctcagtcacacgtgcagggttcacagttagagcacaacaacaacaagtgagtggtgaggtacaaagcagccgtagggcagtgctttcacttgttgctgctggtttggccatggctcttttgtt

SEQ ID NO: 4328 - DNA, 292 bp, Glycine max
  Clone ID: 700559335H1
cggcaacgtctctctccgctacctccccgtctcttttaaccaggccgtcggcgccaccactcccttcttcaccgccgttttcgcttacgtcatgaccttcaagcgcgaggcctggctcacctatctcaccctcgtccccgtcgtcaccggcgtcgtcattgccagcgggggtgagccgagcttccatttatttgggttcatagtatgcattgcagctatgccgcacgtgccttaaaatccgtgttacaaggaattttgctttcttctgaaggagagaagttgaatctatgaa

SEQ ID NO: 4329 - DNA, 293 bp, Glycine max
  Clone ID: 700559336H1
ctactccaaccgcacttctgctccgcaattatcatgggcaaggtcaagatcggaatcaacggatttggaagaattggccgtttggtagccagagtggctctgcagagagacgatgttgaactcgttgccgttaacgaccctttcatcaccaccgattacatgacatacatgtttaaatacgacagtgttcatggacactggaagcatcacgatgtcaccgttaaggacgagaagacccttctcttcggtgacaagccagtcactatttttggacacagaaaccctgaagagat

SEQ ID NO: 4330 - DNA, 292 bp, Glycine max
  unsure (1)..(292): unsure at all n locations; Clone ID: 700559338H1
gtttgttgtgagctataagctagtttatcgtgaggagaatatgaagttgtttgttttctttgttgctgcagtagttttggtagcatggccatgccatggcgcaggctaccaaaggttccctctccgaatgaaaactggctatggtgagcgttcttcggaggtaaaatgcgcaagttttaggcttgctgtggaagcacacaacatccgagcctttaaaaccattcctgaagagtgcgttgaaccaacaaaggactacattaatggcgaacanttagatcagactctaaaacag

SEQ ID NO: 4331 - DNA, 296 bp, Glycine max
  unsure (1)..(296): unsure at all n locations; Clone ID: 700559339H1
gagctattggatgataaattattctcccctgtacttgcacatattcaaccagaatttccattatcaagcaaacatcgaatcagatgattggtatgggcttcaatatggtacaaatgagacaaacatgtcagantttttgaattcagttgtgaattgggatcaagtaacctttgaggatcncattgtnaacagcagagctaccccctggntaatgtaagggatagcgtattnaagcngcgntctagattcngaacttgcgattaatgacatgtatgcaaggctggntctgcggaggg

SEQ ID NO: 4332 - DNA, 295 bp, Glycine max
  Clone ID: 700559340H1
ctggaactagaagtagcagtcactaagttttgtgcataaccttaaaccatgtcattgcctaccactactagtggtcactcatcctatttactctgcacttacattgccaagaaccacccaaattcacccaaccttgttttctcccaccaccaagttcttttcttccaaaagcccctcatattcaggtctttccaattgtttctcaaacacccttttgtcaagacctttgctttttgctgtcaaggcttcatctggggttggctcagaagcatccaaacaggagagtgacaagagt

SEQ ID NO: 4333 - DNA, 292 bp, Glycine max
  Clone ID: 700559341H1
ctaaatcagacttccgggagccggtgaatattggaagtgatgaaatggtcagcatgaatgagatggctgagattgttcttagctttgaggataagaatataccaatataccatattcctggcccagaaggtgttcggggccgtaattcagacaatacattaatcaaagagaaacttggctgggctccaactatgaagttgaaggatgggctgagaattacatacttttggatcaaagagcagcttgagaaagagaaggcagaaggtgttgatttatcaggctatggatcatc

SEQ ID NO: 4334 - DNA, 292 bp, Glycine max
  unsure (1)..(292): unsure at all n locations; Clone ID: 700559343H1
tgaacacacacatagaaacccaacaacaagaatgaagaagatgattctaaccctcttcttcaatatcattttatctctcctctccctctccccacgcctccgtggtggatttctgcgtanagactacacaggccccaatggccccgcaggtaactcatgcaagagcccagcaaaggtcacggtggacgacttcgtctactccggccttggcaccgccggcaacacctcaaacatcatcaaagccgcggtgacgccggcgttcgacgcgcaattccccggcgtcaagggcttg

SEQ ID NO: 4335 - DNA, 289 bp, Glycine max
  unsure (1)..(289): unsure at all n locations; Clone ID: 700559344H1
ctgatcactgcgtgcgttcttccttgggctaactctgcgggaattcagactattgttttggtacctactgatttgggagtcgtggagttgggttctgtcagaatgttacccgagagttttgaactcttgcaggctgttaaatctgtgttctccacgccgattcccaaggttttggtgaacacaattcgcaatcagacacattttagagagaaacttgctgttagaaaaatggaggataataggccttggaacaacaacaacgttagttttccgaatgtgcgganaatgg

SEQ ID NO: 4336 - DNA, 290 bp, Glycine max
  unsure (1)..(290): unsure at all n locations; Clone ID: 700559345H1
gccatgggctgggcccatggctaccttctggtgggcccattcgtgaaggccgggcctctgaggaacaccgagatcgncgggcaagcaggctctctcgccgctggtgggcttgtggtgatcctcagcctttgcctcacaatctatgggatttcatcttttaacgaaggagacccatccactgccccgtcactgaccttgacgggccgcaagaaggagcccgatcagctccaaactgctgatgggtgggccaagttcaccggaggcttcttcttcggaggcatttcgggtgt

SEQ ID NO: 4337 - DNA, 294 bp, Glycine max
  unsure (1)..(294): unsure at all n locations; Clone ID: 700559346H1
cacacacataacaaaaacaatcccatgttcatgttattgctatgtagctgccactagtactcatcctcatcctcaacctgcaagtctctaagtaattagcacctcaactcaaattaaaacaacatcatcgctagtttgctagctgctaattaacacccattaattcttgttggtcaatactaaacagtactaaacatgggtgtctgctttgcttcgctcgctncgccaccaaacaccctctanatccattccctacgcaggttcagggcgtgagtncttggggagcaaggatga

SEQ ID NO: 4338 - DNA, 299 bp, Glycine max
  Clone ID: 700559348H1
gctttttgtgaggattccaaagcatgggcttcccttgcagcatccactgctgctgcttcccttggcatgtcagaaatgcttggaaaccccatcaacctcagtggtgccacaaggccagctccatctgcctctagccctgcctccttcaagactgtggctcttttctccaaaaagaaggctgcacctccaaaaaaagctgcagctgctgctcctgccaatgatgagcttgccaagtggtatggtcctgacagaaggatcttcttgcctgagggtctcttggaccgatctgagatcccaga

SEQ ID NO: 4339 - DNA, 296 bp, Glycine max
  unsure (1)..(296): unsure at all n locations; Clone ID: 700559349H1
atttccttctctctttcaccaatcaacacaaactaagttcttccttctgttgaaagcgatagcaatggccacgaatccaatcgaagcggggaacggcgacgctgctcccaaccctaacgcgactaccaaatcctccgtgtacctgcaagactcggaggagctgaagcgagtcttcagccgcttcgacgccaacggngacggcaagatctccgtctcggagttggacaacgtctccgctccctcggatccggcgtcccgccggaggagctccagcgtgtcatggaagaccttgacac

SEQ ID NO: 4340 - DNA, 290 bp, Glycine max
  unsure (1)..(290): unsure at all n locations; Clone ID: 700559350H1
gaaaaaagaccctttccattctcctccttttcttcctcctccactggctgcacctcgctgccgtgtctctgcctagcgtgaaattggcctcatttcccatctgggtcctgtganttgcgattggaaccgcgttttccccgcttctgggcttggctcagaagtagtcagaatgatgtctgtcacaggcaaaagcattgattttgctggcaaaaacttggtctcttgtggctgctcttccaatgcttcttcgtttgataggtacactgtgaggaatatgccaagctgaatat

SEQ ID NO: 4341 - DNA, 290 bp, Glycine max
  unsure (1)..(290): unsure at all n locations; Clone ID: 700559351H1
atttttgttagtttcacctttgctgccatgtatggtattgctgttgctngcgcttggcatgctgagtaccattgccaccggattggccattgatgcatatggtccaatcagtgacaatgctggaggttntgctgaaatggctggtatgagtcacagaattagagagagaactgatgcccttgatgctgccggaaacacgactgccgctattgggaagggatttgccattggttctgctgcccttgtatcactggccctctttggtgcctttgtgagccgagctgctatta

SEQ ID NO: 4342 - DNA, 288 bp, Glycine max
  Clone ID: 700559352H1
gaaagtgtgtatctgaactttgacaactcaatttcaccttacgagttttttctgtatgcaatgttacacgatggggttccattgtacactactaccattattggttgggaatttgtgagatttaagcaaaaatacaaacttataaactgaagatattgcagccccatctcccatctcccttttgtactgttctggccttgcaggctgtataagttatctgacagattgtgcaatcattgtaaacatgtatgctgacatactttagtgaatcacataaagcaatatggt

SEQ ID NO: 4343 - DNA, 283 bp, Glycine max
  unsure (1)..(283): unsure at all n locations; Clone ID: 700559353H1
gtncggagactttgtccccagcgtcgccttcaccggaaacatgagagtcggcgtttaccaggacactaccgaacctcaacattccaaggtgaagaactacatcatggatattctgaaaagaagctcaggcatatgggtatcagaactagaatcaaacctagacacactgtgggacaacatcgaagcatcactctcgaaatcctcatcagtttcgtaccttttcccgttacaacagtttctcttcacgttcctctgcaaagtccttgccggtgcagaccctgca

SEQ ID NO: 4344 - DNA, 83 bp, Glycine max
  unsure (1)..(83): unsure at all n locations; Clone ID: 700559355H1
aaggaagaatgtgcattgtaagcagcgtcatttctgcttatcntattcgagcttccactccaattgtnaccnnctccactttc

SEQ ID NO: 4345 - DNA, 291 bp, Glycine max
  unsure (1)..(291): unsure at all n locations; Clone ID: 700559356H1
gtttctgtttggctgcccagaaaatctgtgntccactcagaaacattcacaaaacgggttttncgaggcgagcgagtnggtccgncatcggagtcccaaaacacacacacttctgccantttatgagcacgagatcccgtaattcgatacaggagtaggggtttcgnnnnnnnnnnnnnnnnnnnnncctgctctcaagctctgcgtcttgttactcattcttctcggattagtgaatggtncttttgcggagaatgattanggacncgacgaaacgttgttaanagttgg

SEQ ID NO: 4346 - DNA, 287 bp, Glycine max
  Clone ID: 700559357H1
ctcatcgaatctggctggcagtacttgatcacacatttcagtgattttcaactggcgtgtttgggaagtttctttcctgcatgaaggtgttttcttcttgtctggacttcccttcatatggcttgagagggcagggtggatgagcaagtacaaaattcaggccaaaaataacacccctgatgctcaggagaaatgtattgttcgcctgttgctttaccatttggtgtcaatctacctgttatggttttttcatatcccgtcttcagatacatgggcatgcggatagt

SEQ ID NO: 4347 - DNA, 289 bp, Glycine max
  Clone ID: 700559359H1
gccatgaactgctacaacagctccatcagtcgaaaatggcatgagccgttgaatactagctagtgttgtagcagcattaacttaggtatgtatgaagcagccagctcagatccaagaaagccatcggcaccggccaccggtttcccggtgagctacagcaccagcaccacggaggctgaggtgtattcgtattcatacggtccagttgtagtaccagtaccacctccccaccctaaacctattgtggaatggtcaaccggcctctgtgattgcttttccgattggggaa

SEQ ID NO: 4348 - DNA, 212 bp, Glycine max
  Clone ID: 700559360H1
tggactgccacttacaactttagaattgtaattatttagtgggattggtttgggttttgcctgtgtatatgttttcttggttgaatactaatatgggtctgtaattacataggttttaggtttcagtctgtaatatgggtctgtaattacatgggttttgcaactgattgatctttctttgcattcggcatttaagcattgttttaaactca

SEQ ID NO: 4349 - DNA, 290 bp, Glycine max
  Clone ID: 700559361H1
ctggagctgagctgagaaaacccccaaccccaacctcaaccttaacctctcctgcactttcttttcaaccagaactatgattaagctttttaaagtaaaggaaaaacagagagaactggcagaaaatgcgagtggcggaccacccgttaagaagcaaagtgccggcgagttgcgtcttcacaaagatataagcgagctgaatctaccaaaatcatgtaccatgcaattccccaatggcaaagatgacctgatgaactttgaagtttcaattcgacctgatgatggatatt

SEQ ID NO: 4350 - DNA, 136 bp, Glycine max
  unsure (1)..(136): unsure at all n locations; Clone ID: 700559364H1
caagacgcaagccacttcatgaacatcaaaggttatgtactcgcgagcccagctgttgacgggtttcgagagcagaacatgaaagttttatatgcataccaaaggagtcttataccagaagcgctctacaattnac

SEQ ID NO: 4351 - DNA, 293 bp, Glycine max
  Clone ID: 700559365H1
ggccttgctaggcagtccctgattaacgcaggtggcattattgagcaaacatttttgcctggaaagtactccattgaaatgtcatcagttgtttacaagaattgggttttcactgaccaagcattaccagctgatcttgtcaagagaggattggcagttgaggatccctctgccccacatggtcttcgccttgtgatagaggactacccttatgctgttgatggacttgaaatatgggatgctattaagacatgggtccatgagtatgtctctgtgtattacccaacaaatgc

SEQ ID NO: 4352 - DNA, 287 bp, Glycine max
  unsure (1)..(287): unsure at all n locations; Clone ID: 700559366H1
gtcttctgatgtttcttgtctaggcaaactgcgggacgggcgttctgttgcagtgaagaggttgtatgagaacaacttcaagagagttgcacagttcatgaatgaaattaaaatcctagcaaagttagttcatccaaatctgtgaagttatatggatgcacctctcgccacagccgcgaacttctgcttgtatacgagtacattcctaatggaaccgttgctgatcatcttcatggtcaacgatccaaacctggaaaactcccttggnatattagaatgaaatgcgt

SEQ ID NO: 4353 - DNA, 107 bp, Glycine max
  unsure (1)..(107): unsure at all n locations; Clone ID: 700559367H1
accatatcagnttcaaggaacatgatttagaaaactgccaagcccacccatnttcattnntgntgcanaacttgccanccatgaactgaagcaccagcacataccca

SEQ ID NO: 4354 - DNA, 287 bp, Glycine max
  Clone ID: 700559368H1
gttggttcaacttgtgtgaagggattggaacatggaaaatcttggtggttctagtcgtaggaaagcaattgaggagcttcttagagggcgtgattctgcccaacaacttaagagtgtcatcaatgggacttatgatgatggatcagccaccccatttgctcaacaacttgtgaaagaggtgctcatgtccttcacaaactccctcttgttcttgcacaacaaccccacttctgaatcacatgcatgtcttcaatgttcaagtatgggactctcccaagtctgaggac

SEQ ID NO: 4355 - DNA, 288 bp, Glycine max
  Clone ID: 700559370H1
agaaactctaacgaaagagcgagaaagcgaagacagccatggcgtcgtttcttcaatcgtttctggatccgaagaagaactggttcgccgctcagcacatgaaatccctctccaaacgcctccgcaaatatgggctccgatacgacgatttgtacgatccttactacgatctggatgtgaaggaggcgctgaatcggcttccgaaagaggtggtggacgctcgccacgcgcgtcttaaacgcgcccatcgatctttccatgaagcacgagtacctccctgacaatctg

SEQ ID NO: 4356 - DNA, 287 bp, Glycine max
  unsure (1)..(287): unsure at all n locations; Clone ID: 700559371H1
cccaatcccaatacactcccaactcacaaagccatgtctccaggtcctgttgtcgacgcttcccctgaggttgaagcagagcaacaacttccctgccgtgcgatgacgcaacccagttgaagaaatcccaaccgcaggaggatgatgctcccgttgtcgaggacgtgagggnnnnnnnnnnnnnnnnnnnnnnnnnnnnnnnnnnnnnnnnnnnnnnnnnnnacaaggaagacgatgctctaggtggtgctgagggttcaaagcagagcagagtgaganaagagtcg

SEQ ID NO: 4357 - DNA, 286 bp, Glycine max
  unsure (1)..(286): unsure at all n locations; Clone ID: 700559372H1
cttccttcaaccaatttcgagatccgaaaccggcatcagatccgntccgaaatgtacggattcgaagctctcaccttcaacatccacggcggcttcctagaggccatcgtccgcngccaccgcgccggcctcctcaccaccgccgattacaacaacctctgccaatgcgaaaccctcgacgacatcaagatgcacctctccgccaccgagtacggtccttacctccaaaacgagccttctncattgcataccacaacgattgtggagaagtgtatcttaagtggtt

SEQ ID NO: 4358 - DNA, 286 bp, Glycine max
  unsure (1)..(286): unsure at all n locations; Clone ID: 700559373H1
tagtgcaaaagctcctgatcagaaaaataaaattgttagccaggtgaagcaaccaattacagataaacatgaactggttcaaggtaagtctgttgtcaatgatgcaactgtaggaaanaaatttgataagcaaacccctggagaagaaactaatttgcctattgggaggagaaatttaattgcttgtccaagaaacaatgaaaggattttaaacatggataaagatgtatctggttctgctaagtgtcatccggtcaatgcaccagagaaggggattgattcagac

SEQ ID NO: 4359 - DNA, 288 bp, Glycine max
  unsure (1)..(288): unsure at all n locations; Clone ID: 700559375H1
taagcacaagcacaagcacaagcacttctctaattccctttcacactctattacagatttcacaagtgcttacacttcaaatggctttggaagctcttcaatcacccaccananccactccatcgtttagtccctttgaagaaaccagtctcagttacttagagacaccgtggacgaaaggaaagcgttctaagcgtancgccacggagcaacaactgcaacacccttccatgcaccgaggaagagtacctcgctctttgtctcatcatgctcgntcgcggcggcgcg

SEQ ID NO: 4360 - DNA, 285 bp, Glycine max
  unsure (1)..(285): unsure at all n locations; Clone ID: 700559377H1
cagtaatctgcnccaaaagcgttgaaattcaactcaaaatcagaagcggaggccatgattacgagggcatctcgtacatctccgaggancccttcgtcatcctcgacatgttcacctatcgcagaatcaccgtggacgtaaaaaacgaggttgcagtggtcgaagctggagcaacacttggagaagtttattacagaatgctgggagaagagtaaagttcttggctttccagcaggggtgtgtcccactgttggcgtcggtggccatttcagcggcggaggtacg

SEQ ID NO: 4361 - DNA, 131 bp, Glycine max
  unsure (1)..(131): unsure at all n locations; Clone ID: 700559380H1
gcctatcatcccggtaantacaangcncctcacattanggggatggctagcggngaactttcngcgaatatgcgncgtatcgagantctttnagatccaanaaaaggcaantntatgtatctgacggcagg

SEQ ID NO: 4362 - DNA, 289 bp, Glycine max
  Clone ID: 700559381H1
ataacacaaagcacaaagcaaagctcatccttgagttaaaaaatggcagcagcttcttccatggctctctcatccccatccttggctggcaaggccgtgaagctgggcccatcagccccagaagtgggaagggtgagcatgaggaagaccgtcaccaagcaggtctcctcaggaagcccatggtacggcccagaccgagtcaagtacttgggcccattctctggcgagcccccgtcctacctaaccggtgagttcccaggcgactacggctgggacactgctgggtttc

SEQ ID NO: 4363 - DNA, 288 bp, Glycine max
  unsure (1)..(288): unsure at all n locations; Clone ID: 700559382H1
ggctcattcatccaaatttctcaaactcaagctagcctttgggggatatgatagagaagaagacacagtgtgagaaaaaggaaaaaatggaaggtgaagaaactgagatgaaacaacaatccaggttcaaaaggatttgtgtgtnctgtggcagcagncctgggaacaagagtagctataaggacgctgctattgagcttgggaaagagttggtgtcaagaaatattgatctggtttatggaggaggaagcattggtttgatggggttggttcccaggctgtttatga

SEQ ID NO: 4364 - DNA, 286 bp, Glycine max
  unsure (1)..(286): unsure at all n locations; Clone ID: 700559383H1
gtggctggggacatcattgggaccaggaccgagctcgcggaacgtgaagtccacgccgttccagccctacagcgaggtgttcgggctgcagaggttccgccgagtgcgagctcattcacgggaggtgggccatgctcgccactctcggagctctcactgttgagtggctcactggtgttacatggcaagacgccggaaaggtggagctagtggaaggttcatcntacctagggcaaccacttccattctcaatcaccanactgatctggatcgaggttctcgtaat

SEQ ID NO: 4365 - DNA, 232 bp, Glycine max
  unsure (1)..(232): unsure at all n locations; Clone ID: 700559384H1
gcaaacacctccaactacaaacaaacacacttcacaactttgcttttnctctctttccaatgtcctcttcttccttctcccccgccactctcaccaccgagcaggagctttccgtcatcgttgccgcccttaccaacgtcgtcgccggctccacctccgcctccagctccttctccctccccgaattccgccttccacagacctctgatcctctcgccgccgcctgcctaat

SEQ ID NO: 4366 - DNA, 279 bp, Glycine max
  unsure (1)..(279): unsure at all n locations; Clone ID: 700559385H1
gggagatgggtcatctctatgctttggactttgatggagttatctgtnatagctgtggtgagacagctatctctgctcttaaggctgccaaattgagatggcctcccttgtttgatggtgtggnatcaaccatagaagattggattgttgaccagatgatacagtacggccagtggtggaaactggatatgaaactctttnacttgtnaggtgtngcttgagactagagtncccatccatcaggaagtcttccgtttcgaaggggctcaaattgaggaa

SEQ ID NO: 4367 - DNA, 286 bp, Glycine max
  unsure (1)..(286): unsure at all n locations; Clone ID: 700559386H1
ctaagtttgagcttccctctcctctcctcttctccttccagccacaaccctcaganaccctcttggaacgaccctattttcacttcttcaggtgaagctggatcattcctccgcggaatcgatgtgaaccgtttaccttctgtggttgattgcgaagaggaagcaggtgtttcatctccaaacagcacggtttctagcgtcagtggaaagcgcagntngagggaaaccaatggagaagaaaacgacacagacagagcttgttccagaggcatcatcagcgacgaag

SEQ ID NO: 4368 - DNA, 284 bp, Glycine max
  unsure (1)..(284): unsure at all n locations; Clone ID: 700559389H1
attcntttgatactgtgnnatgttcccttgattatactttgttaaagtagacctgtccatcatggatctggctgccagcagncatgntgcaganccattgatgacagtccctgcttgttgagtctctgcnctcagantagagcaatcncaggacactggtgtgtggaagtgccctgtcacatcatttcaaggttgcnntcccaaaatgtntttatatantttgatttcantgtatggtaaagttttgataaaatttggccagtttttacagaagnanttatttc

SEQ ID NO: 4369 - DNA, 282 bp, Glycine max
  unsure (1)..(282): unsure at all n locations; Clone ID: 700559390H1
ctccanttgcaacatantaagtgggttggctggtttagatctgagcaacagnttttaattttctanttgnttgaattttattggaagccatggattgttcatcatggattaacacttccttggatctcaacattaatccccgcagagttcatgaagaagttcccaaggaggtagaaagcgagcttttctctttgggaatgaccangtttaacgtggaagaagagtctactagtgacttggaggaggaactgaagcgggtgactgcagaaaacaagaagttgg

SEQ ID NO: 4370 - DNA, 284 bp, Glycine max
  unsure (1)..(284): unsure at all n locations; Clone ID: 700559391H1
cagcaattgagcgatccccagagtntaacaatggctgggaaaactcanactncantnntnncttctcntgttnctcttcntantctnncatcaacgccaaanttgatctctanccttcagnactagaaggcantcctaactctgncagaangaccttcggagttnaacggtncaagtctccgcaacttctggnttgcgaaacagaaggcgtgttctgcgagcggaggtagctctccggcaaggaaacctacgccctncgaatcaccagacttcgtcttcaaatc

SEQ ID NO: 4371 - DNA, 285 bp, Glycine max
  unsure (1)..(285): unsure at all n locations; Clone ID: 700559392H1
ganaaatctcaaagggaaanacgtcctcgcactcgcgtccaagttcaacgaactgaantccatanacggtgcgtattaacggcgaaagacgtcgccgttnagggcttttgcatganccgctgcgggacccacggctctacccgcaacgtcaaaaacgctgcccggacagcttatatttgggttggaaactccgaaactcagtgcnccgggcaatgcgcgtggccattccaccaacccatttacgggccccagacgccgccgttagtcgcgcctaacggcgacgtc

SEQ ID NO: 4372 - DNA, 280 bp, Glycine max
  unsure (1)..(280): unsure at all n locations; Clone ID: 700559393H1
gctttttaanttaatcgtgtttttacttaattagatactcttctatagcaatgatttccaacttctggcttacataagaatgctggggaagtttgaagggggaaataaaagccccgaggtgcagtccaggctttgatagtttttaaaattgcaccagtgttgagaaagaagtgagtttagaaataggcatcctaaataatgacatcactgatttcagtggccacaattactctgctgtgctcttttggatactgcagctgcctatagagactagtgagtt

SEQ ID NO: 4373 - DNA, 306 bp, Glycine max
  Clone ID: 700559406H1
agcgcggaggccgcacgatgcctggagttactgtaaaagacgttaaccagcaggagttcgtcagagctctggcagccttcctcaaaaagtctgggaagctgaaagtccccgaatgggtggacacagtcaagttggccaaacataaagagcttgccccatatgatgagaactggttctacacacgagctgcttccacagcacggcacctgtacctccgtggtggtgcaggggttggttccatgaccaagatctacggaggacggcagagaaacggtgtcaggcccagccacttcagcagaggctcta

SEQ ID NO: 4374 - DNA, 307 bp, Glycine max
  unsure (1)..(307): unsure at all n locations; Clone ID: 700559407H1
cacaattaacatcaccttatcttttatcctcatttcaattgcattctgattgcctcaaataaacttatactccgaaaagcaaacccatatgaatgtggcttcgacccaacaagttctgcacgccttcctttttcaataaaatttttcttagtagccattacatttctactattcgacctagaaatcgccttactacttcccctcccatgagcgattcaaacaaccaataccactacaataatagcaactgcctttattttagtcactatnttagctcttggcctaagctacgaatggaacacaaaaa

SEQ ID NO: 4375 - DNA, 305 bp, Glycine max
  Clone ID: 700559409H1
gtgcggttgaggcggggatcgctgctgccggtctctcgttttcatcgcagacacttctgctgcaaagatggtcacgtacctaaaacccgaaggactttctgtaagaaatgtggcaagcaccagcctcacaaagtgacccagtataagaagggcaaggattccctgtatgcccaaggaaagcggcgctacgaccggaagcagagtggctatggcgggcaaacaaagccaatttttcgaaagaaggccaaaaccacaaagaagttgtgctcaggcttgagtgtgttgagcccactgcagatctaaga

SEQ ID NO: 4376 - DNA, 304 bp, Glycine max
  unsure (1)..(304): unsure at all n locations; Clone ID: 700559410H1
ggcgganngtcagcagctgcagcagtngcaggagttcgatatccccacgggccggnaggtctgcngggcaacacagcgccntgctaacgggtggccaactactgngaggataantacttgcaggccacagacaagcggaaggcgctggaagagacgatggctttcaccacccaggccctggccagtgtagcctatcaagtgggtaacctggcggggcacacgcttcgaatgctggatctacagggtgctgccctgcggcaggtggaagccaagatgagcacactgggccagatggtgaacatgc

SEQ ID NO: 4377 - DNA, 304 bp, Glycine max
  Clone ID: 700559411H1
gctatctgaaaatcgcattgataagaaagtttaatgatggaagcgggaactgctctcagtctccgactccaactcgcattcccattcccatcaacactgccaattcaaataccttattattccaacctcgcttcactctttcttctcattctccttcttccttttccgcttacagttacagaggccccacaccaaaacgccccttcctcgccgactgggtctcccaaaacgacgacctcgttcgcaccctcccaatctacgtcggctctgcctccctcttcgccgtcctcctaaaccgctccct

SEQ ID NO: 4378 - DNA, 301 bp, Glycine max
  unsure (1)..(301): unsure at all n locations; Clone ID: 700559413H1
ggatcacatnctgganacaaacttgcctatgcaggagtttatggttcttcctgtgggagcttcctcgntcaagaagccangannntgggtgtagnagtgtatcncaatntgaagtctgtgattaagaagaaatatggtcaagatgcaataaatgntggtgacgaaggtggctttgcccctaacatccaggnaaacaaggaaggcttggaantgctgaaaactgccatcgccaaagctggttacacaggcaaagnngtcantggactggatgttgcagctnctganttctacaangaagacc

SEQ ID NO: 4379 - DNA, 303 bp, Glycine max
  unsure (1)..(303): unsure at all n locations; Clone ID: 700559415H1
gcgccgagcgatgggcatctctcgggacaactggnacaagcgacgcnagaccgggggnaaganaaaaccctacacaanaagcggaagtatgagntgggacggccggccgncancactaagattngcnctngccgcatanatacantccgagtncgaggaggcnatnagaagtatcgtgctctgagattggatgtgnggaactttncctggggctcagagngtngtnctcgcaaaacaaggatcattgannntgtcnacnatgcatccaataacgagcttgtccgcaccaagaccctggtgnng

SEQ ID NO: 4380 - DNA, 306 bp, Glycine max
  unsure (1)..(306): unsure at all n locations; Clone ID: 700559416H1
gcgcaactcgtcttcgttccttagactcggctcgatctgcgagangggcttcctagccctccctctctctctcgctgcaattncaggtgatttgtcttcacatggaaacattgcttgcttgagggactcctttgtctcaaaggagttggagttttctgggtttttgtgggattggagatttagagagtgcccctgcactccctgttttatttcatcaccatgattgccactgaaactatagtgccgagtacaaaattgaagatcaagttttcaaccaaaagaaggaggttgagtctgggccaaaat

SEQ ID NO: 4381 - DNA, 303 bp, Glycine max
  unsure (1)..(303): unsure at all n locations; Clone ID: 700559418H1
acagcacggagcccaataatctgaaggcccganactccttccgctacaacgggctaattcaccgcaagacggcngagtggagcctgcggctgatggcaaaggggtcgtggtggttatgnaacgcagatccggtcagcganaacctgccacttcctacgtgaggaccancancaacaagaatgctcgggctaccctcagcagcatcaggcacatgatccgaaaaaacaagtaccgcctgatctgcgtatggcggccatccgnagagccagtgccatccttcgaagccagaagcctgtggtngtg

SEQ ID NO: 4382 - DNA, 303 bp, Glycine max
  unsure (1)..(303): unsure at all n locations; Clone ID: 700559419H1
gttggaaggtagccttggctccacacgcttgaatgtggggagtggaagcagggtggcctcagtcacacgtgagggttcacagttagagcacagcaacaacaagtgaatggtggtgaggtacaaagtagccgtagggcantgctttcacttgttgctgctggtttgaccactggctcttttgttcaagctgtgcttgctgatgccaaacctatcaaagttggancacctcccccancttctggnggattacctggaacattgaactcagatgaaccaagagaccttaagctgccattggaaaga

SEQ ID NO: 4383 - DNA, 303 bp, Glycine max
  unsure (1)..(303): unsure at all n locations; Clone ID: 700559420H1
gaagacctagntcactatgcagatgaaagaggaggagccancgnnnggggcaagaagtctgaanctgatggcatggaaaagaaaacctggcncatgcctagaganaattaaaaagaaccagaggcaagattacttaaatggtgcagtgtctggctcggtgcaggccactgaccggntgatganggagctcagggatatataccgatcacagagtttcaaaggcggaaatangcagtcgaatcgtgaatgacagtctgtatnactagatgttnaactcctcnaagttnaccaggacagnntttt

SEQ ID NO: 4384 - DNA, 305 bp, Glycine max
  unsure (1)..(305): unsure at all n locations; Clone ID: 700559421H1
tttacaatccaactccatcaagtcctccagttggtggaagccatgatccaactccttcaccaccctcaggtggggtggaagttacaatccaactccatcaactcccccaggtggtggaagctatgatccaaccccatcaccacccacagatggtggaagttacaatccaaccccatcaccacccncaggcagcaactgtggcacaccaccacatgacccctctactccaacaccctcagtcccaacaacaccatcaaccccaacaacaccatcaaccccatcaagccatcacaccctccctcagg

SEQ ID NO: 4385 - DNA, 304 bp, Glycine max
  unsure (1)..(304): unsure at all n locations; Clone ID: 700559422H1
gttccgtgttccaaacaatgagtttgagtatgagcttgtgcggtaattacagtcttcagcttcaaaatcgcgaatcgtaagctgcaatcttcaccaggatggcaggcatattgttcccatcaatacgcaccaanaaccttccaaacctgaaaagtgtcttcggtccaaatggaagattaatggcaataacattgggacatgcattggngtcatgacagtggcacacttggttgctccagtcgctgcaaaagctgaagtggctgcttctatttatgctttggctgatggaagcctcggtgactgg

SEQ ID NO: 4386 - DNA, 237 bp, Glycine max
  unsure (1)..(237): unsure at all n locations; Clone ID: 700559423H1
ggcggcgaatcacttataaatggcgcccaagcaggacccgaagcctaaattccaggagggcgagcgagtgcgtgctttcatgggcctcttctttatgaagcaaagtgtgtaaaggttgccataaaggacaaacaagtgaagtattttatccattacagtggctggaataaaaattgggatgaatgggtgccaganagcagagtgctcaaatacgtggacgccaatttgcagaaacag

SEQ ID NO: 4387 - DNA, 301 bp, Glycine max
  Clone ID: 700559426H1
ctgctctctcacgagaagaatactactaactgtgttgtaatacctcagtggagaacaagatgaatccatgaacatgagaacttccaagttactctctcaacaacttgcttatcctccttatcgcttggtagaagagattccaaacatgggaaattccagttgtgtgagcaaggagccaagaggttcacagatgacaatcttttatggtggccaagttcttgtcttggatgatattcaagctgacaaagccaaggacatcatgtcttttgccggcaaaggaatgtctcaaaaccagaacgac

SEQ ID NO: 4388 - DNA, 105 bp, Glycine max
  unsure (1)..(105): unsure at all n locations; Clone ID: 700559427H1
attattgtncttacaattgttgaanagattgtncttgactnccaaaagatntcgtnaagagatatgaatagttcttgtncttgaattgcatggtgnagcaagatt

SEQ ID NO: 4389 - DNA, 197 bp, Glycine max
  unsure (1)..(197): unsure at all n locations; Clone ID: 700559428H1
attggagaganacaaacaccaaataanaatngcaatcatggcaaataagtaccatgttcgttctattagttgccttctagatctcatcctagcaccattagagttgaggaggagcttagcaagatcaaaacttgggaaggaacattcacatccacatcagggtccattcacacaggcatatccttgattgaagattt

SEQ ID NO: 4390 - DNA, 298 bp, Glycine max
  Clone ID: 700559429H1
cagagtcaaagtttaaggcctaagttctctcagctctcattcaacccacttccatcatcaacttcttcctttcttcaccccgtacattcacaactctggccctcttcaaatctaagaccaaagccgctcctgctaagactaaggttacaaagccaaagcaaaaggttgaagatggtatctttggcacttctggaggatttggttttactaagcagaacgagctctttgtgggtcgtgttgctatgcttggttttgcagcatcactgttgggtgaaggaataactgggaaaggaatcta

SEQ ID NO: 4391 - DNA, 300 bp, Glycine max
  unsure (1)..(300): unsure at all n locations; Clone ID: 700559430H1
gnaaacagcatcgancccgtcgtagcagaaaaacttgtgcaccatggtttcttccgacaaggatccacganggatgtccttcaagcctggtacatggatgatagtgatgnagntcanagactcncccaccacaaagaacccaaggagtttgtctcgttggaccaacttgctgaanttggagtccttagctggaaactagatgctgataaccatgaaaatgatccagagctgaagaagatcgtgnagagcgtggttacacctacatggatgtttgtgaggtctgcccagaaaagttgccaa

SEQ ID NO: 4392 - DNA, 128 bp, Glycine max
  unsure (1)..(128): unsure at all n locations; Clone ID: 700559431H1
ttcngccttatttngatattagttcttgttggaganagatttaannacatgannccaacaaaaaggaaggnntctcaagcattcagtgtgagtcccatttgtganttaagggtgccacttangaccag

SEQ ID NO: 4393 - DNA, 187 bp, Glycine max
  unsure (1)..(187): unsure at all n locations; Clone ID: 700559433H1
tgttgctcttggtgttgaatcgcaaacgcggntccgccatgggantagnggatgancgnnagatgctcactggctccgagaccccaaagnggangaagaggaaganttagtggaccccctgacaacagtgagagancactgtgagcagttggagaagtgtgtaaaagcccgggaacgactanagtcg

SEQ ID NO: 4394 - DNA, 307 bp, Glycine max
  unsure (1)..(307): unsure at all n locations; Clone ID: 700559434H1
gnnttttgctagaagcaggacgagaagagaaacaagcaaacnacgaantaatccaattgagctacttactatagatttngatctcccagacagnggagtttcacnnnattgcccagtaccctttnacaggatcaaggaagagactcaanaaccaacannaggtgttgtncattgnngtanttgtttgtaactgtagcnacaggaagatggttggatagttggttntngtgaggctgtgnngaccatatctgtgttgagcnctctccntctgacaacctcggnacngncagntgnaanggcnangcct

SEQ ID NO: 4395 - DNA, 206 bp, Glycine max
  unsure (1)..(206): unsure at all n locations; Clone ID: 700559436H1
ggcaaagacactgtnanaaccgagatctatccgggtatattcggaactgcggagtctgaccgccgtgcatnctactcagctcacactgtctctttctcactgtgggagtagctatgggaaaggtcacacttccttgcnttcccctcaaaccancagggnttncanttctcagtctcccaacgcactgcacacngctcncagcatcc

SEQ ID NO: 4396 - DNA, 301 bp, Glycine max
  unsure (1)..(301): unsure at all n locations; Clone ID: 700559438H1
ccaatatagcccaagccctatacaaccaaaccctancacacacccatttnattcagtttccatggctagctcaaggttgccatttttggctgcagtgctctgcatggttgtggtgagtgcacccatggcacatgcagctatcacgtgcgggcaggtgacgaatagcctgatcaattgcatcggttacctccagaacggaggaacgccgccgtcgggatgctgcaacggagtgaagagcctcaatgccgccgccaagaccaccgccgaccgccagacggcgtgcaatgcctcaagtcggccg

SEQ ID NO: 4397 - DNA, 86 bp, Glycine max
  unsure (1)..(86): unsure at all n locations; Clone ID: 700559439H1
cagggcangttatgtatggncagcctggnagtnnncatcatcntnatnagttacatccagtgctgcaggcgggtggaccgganggc

SEQ ID NO: 4398 - DNA, 60 bp, Glycine max
  unsure (1)..(60): unsure at all n locations; Clone ID: 700559440H1
gacctggtctagcangangcgcnatcatgggtgttngacnttcgccacgacaagnnccgg

SEQ ID NO: 4399 - DNA, 300 bp, Glycine max
  Clone ID: 700559442H1
cgaaaagatcaatgaaccggaaaggcagtggcactgtacagcttgtcgaggtggtcccggtggctattgttggtacagaggactgcagcctctgattactcatgccaaaacaaaggggtcaaaaagggtgaagatccatagggagtttgctgagcttttggaagaggaactgcgcaaaaggggctctgcagtaattccacctggggaagtatttggtaagtggaaaggtttaatgaggagctagccaagctcatggaaaagtattccctatctcacccagaaaagtccaatggtatctga

SEQ ID NO: 4400 - DNA, 297 bp, Glycine max
  unsure (1)..(297): unsure at all n locations; Clone ID: 700559444H1
ctcatcttcctctttttctcaaccaaaaggggttcaattctagctagttctattacatcgtccgcnccatgaacatggccgatcgtgcttctgttcatggttttcgcagtttcatcagctttagacatgtcaataatatcacatgacaacgctcatgcggatagggccacgaggcgcaccgacgacgaggtgatgtcaatgttcgaggagtggttggtgaaacacgacaaggtgtacaacgcgctcggtgagaaggagaagaggtttcaaatcttcaagaacaatctgcgctttatc

SEQ ID NO: 4401 - DNA, 269 bp, Glycine max
  unsure (1)..(269): unsure at all n locations; Clone ID: 700559445H1
ctcntctatctattataaccacacactcttcttcatantcttttcttcntcttgttcangttctatctgtgacgagcatcatggcctcgagagcngtgctattgttggctatgtgtgtgcttccggccatggttgtggccattcgcccagcaaagaaccctttttgcgtgaagggtcgcgtctactgtgacccttgccgtgctggttttgagacctcagcaaccactacattgccggtgctgagattatgttgcaatgcaagagcnggg

SEQ ID NO: 4402 - DNA, 300 bp, Glycine max
  unsure (1)..(300): unsure at all n locations; Clone ID: 700559446H1
ggagacttttnggggagagtgngtgagagtaaaaagatgtntctgcgtgcgntggcgcggccgttgtnntcgaangtgaagagcttccgacggggatcgnggggctngacgtggtgccgancgcgngggaggtgctcgattgggctgtacagcaagacgctnaaagagatccagaangttcccgaanatnaagggtaccgcaaggccntngagagcttcaccaancanaggctcngngtntgcnangaacnannatgactgngcgaanatcnagaaacgcnttccgctgcggcnaggtcg

SEQ ID NO: 4403 - DNA, 300 bp, Glycine max
  unsure (1)..(300): unsure at all n locations; Clone ID: 700559448H1
gnattanagattatctctaatccgcaatgcaaagtttagactagaagagagaggcattactccaactatgataggattgcnaaataccttaacatgtctcaaaagagagtcagaaatgcnactgaggcaatcagcaanattatctcgcttgatagagnagcantcccctctctgantggnctanaaggngaaactcatnatagttntantgcagatnatcgagnggagaacatncctggaatggagtagnngagtgngcactnnnggatgaagtgnanagacncattaatgtgnccttgt

SEQ ID NO: 4404 - DNA, 69 bp, Glycine max
  unsure (1)..(69): unsure at all n locations; Clone ID: 700559449H1
acactgnagctaaccgccaggcataccgtacctcctcgtggncantccagggcttgggngtacatctct

SEQ ID NO: 4405 - DNA, 303 bp, Glycine max
  unsure (1)..(303): unsure at all n locations; Clone ID: 700559450H1
gaaaattctctttagagagatanagagaggaaganagaatggnagcttgcactgtctactgcaacacatctctgagcacaaattngctccatctcaaccccntcnaagacgcnactcagttttgtccaccaaaagcaggtagttttctggaggaacagcaagaagggcagctgcagcaagcagncagagtctatgtgataacntgngcagcaggtgactcacanacantggtgattggcctgggtgcagactccaggtgtgggaagagcacttcatgaggaggctgaccagtntgnttggngg

SEQ ID NO: 4406 - DNA, 295 bp, Glycine max
  unsure (1)..(295): unsure at all n locations; Clone ID: 700559452H1
cacaatttctctctttctttttgtgtccaaaatggctcctagttctnctcacaatactgggttctagtgcttatgctagttgggatagtgattagcactatggttgctacctgtgctggtagcttctaccaagactttgatctaacatggggtggtgaccgtgctaagatattcaatggtggccagcttctatctctttcccttgacaaagtctctggctctggcttcaaatcaaagaaagaatacctatttgggaggattgatatgcagctcaagctcgttgctggcaactctg

SEQ ID NO: 4407 - DNA, 299 bp, Glycine max
  unsure (1)..(299): unsure at all n locations; Clone ID: 700559456H1
gggnttcggnaacgcancgcnntgnaacggagccaaggagncntgngagntancaggaggtgatggatccgtgagagctcattgannanntgtgcngnganagcatctgaggatancccttttctcngctcttnacctcagcagaganggcatctnctgcagtttccaagnctcaagcctcgaggcagattctctggtctaatgtctggctggggttctccgtctgcntcncgnatccatattctntgttncaccntttatagtaattnctctgtggcacatatcacagagctcctcct

SEQ ID NO: 4408 - DNA, 298 bp, Glycine max
  unsure (1)..(298): unsure at all n locations; Clone ID: 700559457H1
ccggaattgaataganatagaatcgtcgatnttctctttctctgactctagggtttcattntttnctctgtagatcnatctatctagcttcggagctgcaaatggncgtcgcagtcactgccttccggtcaccgctgatcatcctcngaagaccggtcaacgagtctgcctcagctcggttcggttccacttttgggtttnccagaaagnaacggttcagttcagtatgtatncccaaacacaagcacaagcaaggtcgtacaagagggtttgtagttagagcttctgcatcctcatc

SEQ ID NO: 4409 - DNA, 294 bp, Glycine max
  unsure (1)..(294): unsure at all n locations; Clone ID: 700559458H1
gttcggattgcggcgacgtgagcggttcgctgcccgcgacgtngtgagaagtccactgaaccttacatttagaggaagaagaagccttccctggagaatctgaatgagatgcccatcagattatactacaccatgaagctgtaggtaccaatgaaaccataaaatgatggaagatttgtgaagccattcttttaccctgagcatctaggaatttatcctcatagattttagttctgactttgaaagatggttctggaaccaatgcttacataatgtatagcttgtccaccgttt

SEQ ID NO: 4410 - DNA, 292 bp, Glycine max
  unsure (1)..(292): unsure at all n locations; Clone ID: 700559460H1
catgcntgtnagagagacaggtaaagttgctgaaaggagctgcttttnctcgtgtatctgctaagctgttataggcacttgagcaatttggaaatgtcgaatttattgcggcattctttgagcaaattcactttcagtccaaacggnacaccaactgggagngananagtnacaccanaacataagcatctgagaccatttcaatgtgtgctgacacaggataacagangcattgccgtcaagaatggcaatgattcattggtcatntgtcgggttgtgaatgggatgtggc

SEQ ID NO: 4411 - DNA, 294 bp, Glycine max
  Clone ID: 700559461H1
gctgaggagaaccgctatgtggtccggctaagtgaaagcaacctggtcatctgatgggctgtcagaattgacactctgccccgtcctggaaggctcggaaggcttcctgcaggagggagagctgcacgggactgaggaccaagatgcaaaggcctagcagacaaaacagcaaaggccaagtccctggaggtgggaccgtccgccccactgaggaggcagcctgcggtacagcacgtgagcaggagatcaagaacccgccctatccctgcagccccggttacttccatgcagggt

SEQ ID NO: 4412 - DNA, 295 bp, Glycine max
  unsure (1)..(295): unsure at all n locations; Clone ID: 700559462H1
gtgccacctgagaacggttgttcgaatgagtggcgaggataacgtgctgttggagatggtgtatcgggacagaaagggttgctgttgccaggtggtagaggaggcagagggaatgcttcattcaagtcagggactaataaggtccccaagattgccgagaatggggaagagggtcctgaaatgtggttggagttagaactcaagctggttncggatgttggtatagttggtgctccgaatgcagggaaaagtacacttttgagtgttgttagtgctgcaaagccggctgttgcta

SEQ ID NO: 4413 - DNA, 300 bp, Glycine max
  Clone ID: 700559463H1
ccacgtggataatgagaattatatgtaaaacttactgttaggattatctttctatatgctagcctgttgttatggttccaattggtttcctactagtatgtgagacacatatagtcaaattccatctttccagcgaattcagtttttcctctcaaattatcctagttcatgccatgcagcagaaaatgaggtagattgagcagcaataagaataacaaattgaactaattgaaagatataatgtgcatgcaattattatgtagcattgttataaaaatgtcctcagatattgttgaatcc

SEQ ID NO: 4414 - DNA, 179 bp, Glycine max
  unsure (1)..(179): unsure at all n locations; Clone ID: 700559465H1
cttccctcgcgtttcaacaccgataacccgcaaaantctccattgatctgngcctcctgttccatggcaaagtgcctntngaatanaacggcgactgcgccaccaccgcctcagcatccgcctccgcagccgcggagtctcagagatccattcccacgccgtttctcancaaaaccttt

SEQ ID NO: 4415 - DNA, 297 bp, Glycine max
  unsure (1)..(297): unsure at all n locations; Clone ID: 700559466H1
gtcttgcccgcagaccaaggtgctganagtacnatttggcnaattgccaaggcatatgttgtngcnatgactcctgctatcatcaactcatgagccactggntaaatactcatgctgtgattgaaccatttgtcatagcnacaaacaggcatcttagtgtgctccaccctatttataaacttttgttgcctcactatcgtgacaccatgaacatcaatggactcgcaagacaatcactcatcaatgcaggtggcattattgagcaatcatttctgcctgagccatttggctgtggag

SEQ ID NO: 4416 - DNA, 295 bp, Glycine max
  unsure (1)..(295): unsure at all n locations; Clone ID: 700559468H1
gatttttccaatcccatcatcctctctgtctcgcaggggacagccaccaagaaaggcaatttaaggaaggttatacgacatggtcaatgccactaaaggggtctttatttcctgtgacatacctatggcacaatatatcatcaacatgaatgcttcattgcctgcatctgacaagttcattatacatatcttggatantncccattatggttgttcaacctcatgttgagcaaatgatacgaagncaaattgccngttngagaggncaatacatatgtcaaggcctaattgattt

SEQ ID NO: 4417 - DNA, 96 bp, Glycine max
  unsure (1)..(96): unsure at all n locations; Clone ID: 700559469H1
gagtttccattcactcnccactgttccncctttctgatanctggaggcagttcatcttgacttgtaagtgcccataaacaaatncttccaggacct

SEQ ID NO: 4418 - DNA, 292 bp, Glycine max
  unsure (1)..(292): unsure at all n locations; Clone ID: 700559471H1
agcaacaataacaatggcagcctcactacaagctgcagctaccttcatgcaacccaccaaggtggcatggccactcgcaacctcaaatctacacaatgcatttctaaggcttttggcttggaacccgctgcagctaaactcatttgctcccttaagcccgatctcaaagantttnctcaaaaatgtgtcgacgccaccaaaattgcaggattcgcccttgncacctcagntctcgtngtttctggagcgagtncagaagtgttcccaagaggtanccttcgacgaaatccag

SEQ ID NO: 4419 - DNA, 128 bp, Glycine max
  unsure (1)..(128): unsure at all n locations; Clone ID: 700559472H1
ggctnagactagtcgngagaananaaggccgntggagaggtctganaacagnatntacangcccaccctcagagtgngctctccattcccagcctcagtccaggagncagacccnacacatatngcat

SEQ ID NO: 4420 - DNA, 293 bp, Glycine max
  unsure (1)..(293): unsure at all n locations; Clone ID: 700559473H1
gcagccatggctcgtggtcccaagaaacatctgaagcgcgtagggctccaaaacactggatgcngataagctgactggcgtgtttgctcctcgtccatccactggtccacacaaactgagggantgcctgcctctgatcattttcctaaggaacagacttaagtatgccctgactggagatgaagtaaaaaagatttgcatgcagcgattcattaagattgatgggaaagtcaggaccgatataacctaccctgctgggtttatggatgtcatcagcattgacaagactggag

SEQ ID NO: 4421 - DNA, 266 bp, Glycine max
  Clone ID: 700559474H1
aattccttattttatttttttgactgagaaagaacaaaggctgggtgagtatggaggtagggagctaggacccatgcagaaggagctggctgagcagctgggcctgtctaccggggagaaggagaaattgccaggagaactggagcctgtgcaggccgcccagaacaagacagggaagtatgtgcctcctagtctccgggacggggcaagccgccgtggggagtctatgcagccaaaccgcagagctgatgacaatgccaccatcc

SEQ ID NO: 4422 - DNA, 289 bp, Glycine max
  Clone ID: 700559477H1
aaccatgttattgataggggctgggccttctactggggcactagcgagtggtcggctcagagatcaccgaggcgtgggctgtggctcagagattggaccttgttgggcctattgttgaacagcctgagtataacctcttgtccaggcacaaggttgagtcggagtttcttcctctgtacaccaactatggcacaggcctcactacatggagtcctcttgcctctggagtgctcactgggaaatataagaaaggagttataccaccagatagcagattcgctttggaaaa

SEQ ID NO: 4423 - DNA, 216 bp, Glycine max
  unsure (1)..(216): unsure at all n locations; Clone ID: 700559482H1
gctactactacccncagtnctcnntcagcaatgcanaacttgtcaagtgcngtgcatcatcagctactanttgcaacaacttcatcatcttactcttatcncaanacacccttccttcnacgcagngaacttcaacnangtgctcntctcataggtattactgtnatntgcaactaccattcttctntntctctncnntttgnnctngaaagacng

SEQ ID NO: 4424 - DNA, 293 bp, Glycine max
  unsure (1)..(293): unsure at all n locations; Clone ID: 700559483H1
tttgggttttgtagatggcaagtgggtttggggaatcaacagggagatcacccccaagccctcctacttcaacaacaataataacaatgatgctgccaattttgaatgcaacatttgctttgaattagcgcaagacccgataattactttgtgtggtcatcttttctgctggccctgtctttacaaatggcttcactttcactcacaatcacgagaatgcccggtnnngcaaggccctcgtggaggaggagaagctggttcccttgtatgggagaggaaagtcgtcgactgat

SEQ ID NO: 4425 - DNA, 292 bp, Glycine max
  Clone ID: 700559485H1
aattttccagccacggccggcggctcgcagagtacaataaacagggacggagaactatttgatggaccccccttcctcatgatgcggtggagaagccgcggccactcggtcctgccagatgttcttggggttactgtacaaggggagaacgagcagagctaaacaagaatttaaaaaggacgaaggaaggagaccgccatcctgctcagatacaaagatctaagagggttgtttcccccgcatcctccaaagctgtgagcatcagaataatattttcccaaagagtgcatcg

SEQ ID NO: 4426 - DNA, 223 bp, Glycine max
  Clone ID: 700559487H1
tgttatgtaagggtattaatcttcattatgtatggtctagtctaggtcttagtgtcttctaggtggctgcttactgcaatggagtttttggcaattgcagagccagtcttagttaattactagtattctgtgtataatctctctctaccttgggtcatagctggtttttttcttgcttgaccagggagaattagtccacttaatatgtttctcaagtgcatcg

SEQ ID NO: 4427 - DNA, 292 bp, Glycine max
  unsure (1)..(292): unsure at all n locations; Clone ID: 700559490H1
cntnctctncaacgaggcggccgagcggcagacgccaancatgcagancntcgtgaagacctgacgggcaaagaccatcactncttgaggtcgagcccagtgacaccatcgagnatgtcaaggccaagatncaagacaaggaatgcatcccccctgaccagcagagactgatctttgctggcaaacagtggaggatggccgcaccctgtccgactacaacatccagaaagagtccaccttgcacctggtgtgcgtcttcgcggtggcatcatcgagccgtcccttcgtcagt

SEQ ID NO: 4428 - DNA, 287 bp, Glycine max
  unsure (1)..(287): unsure at all n locations; Clone ID: 700559491H1
tagttgtgttnactcacaaactcaganacagacaccatggtgcacctgactgntgctgaaaggctgctgttaatggcctgtggggaaaggtgaaccctgatgatgttggtggcgaggccctgggcaggctgctggttgtctacccttggacccagatgtactttgatagtttggggacctgtcctctgcctctgctatcatgggtaancctaaggtgaaggcccatggcaaganngtgataaacgccttcaatgatggcctgaaacacttggacaacctcaagggca

SEQ ID NO: 4429 - DNA, 286 bp, Glycine max
  unsure (1)..(286): unsure at all n locations; Clone ID: 700559492H1
ctttggcctcgccggtagaagcaagatgacgaaaggaacgtcatctttggaaagcgtgcaataagacgcacacgtgtgcncgccgctgtggctccaaggcctaccaccttcagaagtcgacctgtggcaaatgtggctaccctgccaagcgcaagagaaagtataactggagtgccaaggctaagaggcgaaacactaccgggactggtcggatgaggcacctaaagatcgtctaccgaagattcagacatggttccgtgaaggaacaacacctaaacccaagagg

SEQ ID NO: 4430 - DNA, 287 bp, Glycine max
  unsure (1)..(287): unsure at all n locations; Clone ID: 700559493H1
gaaaaggccngtngngaggtctganaanagcatntncacgcccatncctcagantggnctccattccgcagcctcagtgcaagncccaggtcctacacatatggcgtgtggagaagctgaagncggtgcccatagcacganagaaccatggcatctttttttctggggatnctacctagtgnntcacaatngcacngaagaggcctcncatctgcacctgtggataggccagcagtcatcgcgcgatgaccatggggctgcgctgtgctagtgtgcacctcanaacc

SEQ ID NO: 4431 - DNA, 291 bp, Glycine max
  unsure (1)..(291): unsure at all n locations; Clone ID: 700559494H1
agtggacaacactgacacgcatcatctctctcacattctcaaaatgctaaccttcaatctaatggctatcncttgcttcgttgctcagttgttccatttcatgccaattatccactgtctactcaaacccaattgttagttccttccaatcttagttactcctttgctacaacaggaaccagaaagttcaagtctttccagctcaaggctggattttgggaatcaattaaatctgggttgatgaagaataatccatgcaagtcatgatccaccctctgcagatgaagagac

SEQ ID NO: 4432 - DNA, 288 bp, Glycine max
  unsure (1)..(288): unsure at all n locations; Clone ID: 700559495H1
angatagctaggcctnagnagnagaacancnatggccactggccactgttntcaantagacntatgcgtngccttcgganncccattgcgccatttcccacgacgctaaaacctctnatntctnaacctttcagtntcaatcgnttccttctacntcttanaagntcantttntcggctcggtcacntattntcaancttcctaaggtctctgaatccgcggttgcngaaaccgaaacnggttgtncgagccgaacngncnaaattgtcncggctcagtnctctggga

SEQ ID NO: 4433 - DNA, 166 bp, Glycine max
  unsure (1)..(166): unsure at all n locations; Clone ID: 700559496H1
ctcnagaagcaanccatggttgcctctctgnaagatgacaaaagccancatcaagaactgctgggggnagttggtggccntggtggtgaaatatggcgaggaggccctacagnggatgttcgctgccttcacccaccaccnanacctnnttctctcgnnattgatg

SEQ ID NO: 4434 - DNA, 290 bp, Glycine max
  unsure (1)..(290): unsure at all n locations; Clone ID: 700559502H1
tttttcttgaagactacttcatccttcttattagtntctntttatttcaatctttctcactggcacgcacgcacgcacagtctctagtggtaccgtgccggttcatttgcttcatccaccacctcattttcagagatttcgtgcactcaacaaactctcatccacccatggcgtcatcactatcaacaatagctctattcctgccccaatcgctctatattaagccccgcctggcgccacggcctcttcctccccctcaattccgctcccttttcctaacctcaccggcg

SEQ ID NO: 4435 - DNA, 290 bp, Glycine max
  unsure (1)..(290): unsure at all n locations; Clone ID: 700559503H1
atggaaatcaagttgacaacttccacagtatcaatccatntcanacctatncaataanttctgtttcacaanttgtttcggaaaataatagtttgacatcacatgagataatagacattccaccttctagcaaagttgtttccactcatgaagttactngtcacaatgaatttcaagggataactcctgttggaaattcttctgccgaggaaaagggagaatctacagcaaaagctgangaagcaggcacatctaccctcgttggatgttctgagcaggaaactgcttct

SEQ ID NO: 4436 - DNA, 285 bp, Glycine max
  unsure (1)..(285): unsure at all n locations; Clone ID: 700559504H1
agacacttgaaataatgccaagtatactaaatgtcttagtcttaagaggggggaaanactggaatttccaatgatncttaatttcttacaatccaatctgcaaactgagtgagatatataacttgtttttgatttcttcctcatcattttgcntanacanagattaaaatggaagggttttntggaaattgcttcaatatgantttgctgatgttgtgcttcaccaacttgagcatagctnttgctcaangtcatatgaatggatttggagagcagccatggcca

SEQ ID NO: 4437 - DNA, 289 bp, Glycine max
  unsure (1)..(289): unsure at all n locations; Clone ID: 700559505H1
cgttgctctgcttcaacattggcggaagcagaagaagcgccgcagctatggtgaagtactccagagaacccgacaatcccaccaagttcctgcaaggccanaggcgctgacctcagagttcattttaagaacactagggagactgcctttnccatcaggaagttgccccttgttaaagctaaacgatacttagaggatgttttggcccacaaacaggctattcctttccgncgcttttgtggtggtgttgggaggacggcccaggctaagaacagacactccaatgggc

SEQ ID NO: 4438 - DNA, 286 bp, Glycine max
  Clone ID: 700559507H1
cccaactcaatttttctctcaaccggcccaatttagcataagcccagcatggccaccgcaacagcagcagccacctcgtccttcatggggacgcgcctcctggaggcccactccggggcggggcgggtgcaggcccggttcgggtttggcaagaagaaagccgccgccccgaagaaagtttccagggggtcgggctctagctccgataggcccctgtggtatccgggcgccaaggcgccgagtacctggatgggagccttgtcggagatacggattcgacccattt

SEQ ID NO: 4439 - DNA, 289 bp, Glycine max
  unsure (1)..(289): unsure at all n locations; Clone ID: 700559508H1
gntttactccaggcacacctgnantttatggctccagaagtntatgaagaggattacagtgagtnggntgacnnatactctantnggantatgcatcttagagatggtcacttttgnatatccttatngtgaatgcaaccatcctgcncaanttngcnagnaagnngtatctgggnanaagccagaagctcnttacaangtagacaatcccgaggttaggcagtttgtagagaaatgcttagcaatgtgtccctcagactttcagctagggaatcttggnggacccttt

SEQ ID NO: 4440 - DNA, 283 bp, Glycine max
  unsure (1)..(283): unsure at all n locations; Clone ID: 700559509H1
tggttttccaaacanacattnatcacncacttcgtattgtttcctgctcatggctcaaggccacatgatccccatgatggacattgcaagactattggcacggcgtggtgtgattgtttccatattcaccaccccaaaaaatgcatcacgattcaattctgtnctttctcgtgatgtttcatcaggcctcccaatccggctagtacaactccattttccatccaaagaagcaggactacctgaagggtgtgagaatttggacatggtagcctcaaacgatttg

SEQ ID NO: 4441 - DNA, 290 bp, Glycine max
  unsure (1)..(290): unsure at all n locations; Clone ID: 700559510H1
gaaacttaagtatgcagctgacatttcttctggaatcattctcggaagggagcttgtganttcctccggctaatgtgctcacgccaggggtattggctgaagaggcatcaaagatngcttcaacatataatgatgtttttactgccaaaatattagatgctgagcagtgtaaagaattgaaaatggggtcctatcttggtgttgctgcagcctcagcaaatcctcctcattttatccatctgtgttataaaccaccaactggacctgtcaatgtcaagttagcattagtc

SEQ ID NO: 4442 - DNA, 292 bp, Glycine max
  Clone ID: 700559511H1
ctgtttcccgccatatatccaataagctttaaccatgtctgcctttgttggaaagtacgcagatgagcttatcaagaatgccaagtacataggccacaccagggaaggggatcctggcagcagatgagagcacgggcaccatcgggaagcgcctagcgagcattaacgttgagaacattgaggccaaccgccaagcccttcgcgagcttctcttcaccgctccaaatgccctccaatacctctctggtgtcatcctctttgaggaaactctttaccagaagacctctgatgg

SEQ ID NO: 4443 - DNA, 248 bp, Glycine max
  unsure (1)..(248): unsure at all n locations; Clone ID: 700559512H1
gcggcttccaatgggccactctgcaattcaccttacaccgactgcaaccacattgttcaggccttctctaccttccacgcgaaccttctctagaaaccgaagcctcattgtcaaagnnnnnnnnnnnnnnnnngacgacttctccaaaagcaggcgacgcttcatcgccgaaaccgccgcactctcggtctcgctccctcagttagcggcgcgtgccgaagacgcgctttcggagtgggagagagtat

SEQ ID NO: 4444 - DNA, 294 bp, Glycine max
  unsure (1)..(294): unsure at all n locations; Clone ID: 700559513H1
ctattctcctcatcttcctctttttctcaaccanaaggggttcaattctagctagttctattacatgcgtaccgcnaccatgaacatggcgatcgtgcttctgttcatggttttcgcagtttcatcagctttagacatgtcaataatatcacatgacaacgctcatgcggatagggccacgaggcgcaccgacgacgaggtgatgtcaatgttcgaggagtggctggtgaaacacgacaaggtgtacaacgcgctcggtgagaaggagaagaggtttcaaatcttcaagaacaa

SEQ ID NO: 4445 - DNA, 272 bp, Glycine max
  unsure (1)..(272): unsure at all n locations; Clone ID: 700559514H1
anttgaagttgaagtcttgccctactctcttcaactccaaacacaagacatcatcatccatggctgcctccgtctccactgtcggagctgtcaacagagctcttttgaacctgaatgggtctggacctggggtttcagctcccagttcatccttctttgggagcagcttgaagaaggttattggctcaagggtccccaacacaaagatttcctctggaagcttcaagattgttgctgtagaagagaagaaagagattgaagagacccagcag

SEQ ID NO: 4446 - DNA, 231 bp, Glycine max
  Clone ID: 700559516H1
aatggcaccgaagcagaccaaggctgagaagaagatcgcttacgatgcgaactgtgcgacctaatggaggagtacggccagatcctcgttgtgaactccgataacgtgggatcgaaccagctccagaacattcgcaagggtctccgtggcgactccgtcgtcctcatggggaagaacaccatgatgaagcgctcagtcaggatgcacgctgagaaaaccggaaacaacgct

SEQ ID NO: 4447 - DNA, 287 bp, Glycine max
  unsure (1)..(287): unsure at all n locations; Clone ID: 700559517H1
anagagagagaatggtcagcacttggtggcaatcgtgatgtggcaggaagccagaacagccttgagatcgatggtttagctcgctttgctgttgaagaacacaacaaaaaacagaatgcccttttggagtttgaaaaggtagtaagtgcaaaacagcaagtggtttctggtaccttgtacaccatcactttggaggcaaaagatggtgggcaaaagaaggtttatgaagccaaagtttgggagaaggcatggttgaacttcaaggaggtgcaagagttcaagcttgt

SEQ ID NO: 4448 - DNA, 287 bp, Glycine max
  unsure (1)..(287): unsure at all n locations; Clone ID: 700559518H1
tngcatgcnttgcttatgaagacccttctgcagcnnattctggctggcggtttttacaatanannatgntntgangggttacaaaatcagtgttgcaatggcagaanaatctgcaccaagagctccacntgcatataaccaagggggcaataggggtggctatggtggagatagacgcagagacaattatagtcgatggaggtggttctgggcctgataggcgtgancattatggantcgttctngtccatactgagagcttggncattgaacgttttatgtacnnt

SEQ ID NO: 4449 - DNA, 284 bp, Glycine max
  unsure (1)..(284): unsure at all n locations; Clone ID: 700559519H1
attcacctgagctttttgtgaggnttccaaagcatggcttcccttgcagcatccactgtgntggcttcccttggcatgtcagaantgcttggaaaccccatcaacctcagtggtgccacaaggccagctccatctgcctctagccctgcctccttcaagactgtggctcttttctccaaaaagaaggctgcacctccaaaaaaagctgcagctgctgctccngccaatgatgagcttgccaagtggtatggtcctgacagaaggatcttcttgcctgagggtct

SEQ ID NO: 4450 - DNA, 286 bp, Glycine max
  unsure (1)..(286): unsure at all n locations; Clone ID: 700559520H1
ccaaaaccctaggtagagagctcttcctcaactctcattcgcantggccgcagcagcacgtcctctcntcaccgtgcaggccctgcgacagtgacatggccaccgacgcctccgccaccgtccctatccctgacgtcatgaagtcctccatccgcccggacatcgtcaacttcgtacactccaanatctccaagaacagccgacaaccctatgcagtcagccgccgcgctggccaccagacttccgccgagtcctggggaaccggtcgtgccgtctcccgtatccc

SEQ ID NO: 4451 - DNA, 286 bp, Glycine max
  unsure (1)..(286): unsure at all n locations; Clone ID: 700559522H1
caacatgccaaacgacagcgttctgagtcttttcttcttcgttaccctcttcacatgccttctnctctgctaattcccacgatgaccatattttcctaccgagtcaactccatgacgatgactcagtgagttgcactgctaccgacccaaaccttaactacaagccggtgatcggaatcctgacctaccccggcgacggtgcctctggccggctcagcaacgccaccggggtttcttacatcgccgcctcctacgttaaattcgtggagtccggtggtgctagagt

SEQ ID NO: 4452 - DNA, 284 bp, Glycine max
  Clone ID: 700559523H1
caacatcaaggttcctctcattcttggtatctggggaggcaagggacaaggaaaatctttccaatgtgagcttgtctttgccaagatgggaatcaaccccatcatgatgagtgctggagagttggaaagtggaaatgcaggagagccagcaaaactgatcaggcagagataccgtgaagctgcagacatgatcaagaagggaaagatgtgcgctctcttcatcaacgatcttgatgcaggagctggtcgtcttggtggaaccacacaatacactgtgaacaacc

SEQ ID NO: 4453 - DNA, 285 bp, Glycine max
  unsure (1)..(285): unsure at all n locations; Clone ID: 700559524H1
attcagaagcagaggganagggtgtttgtgattgcaagtgttggtgcattcaaaagagagagtaagaagagtgtgcatgaacatcatgagtagtagtagaagcagaggcagctggtncggtttgtggcctggttccttcaatatggaaactgagttgactattagaggaaagagttttggtggcatttttggctcctctgctaagcctagatcactcagggttcagtcttctgatgaagatgttgaggatcttgtcccctctaatatttcgggcaaaccttctgg

SEQ ID NO: 4454 - DNA, 284 bp, Glycine max
  unsure (1)..(284): unsure at all n locations; Clone ID: 700559531H1
gctcatcctaagaaacgtgcggngcgtcgaatttttaaggagacaaggcatcccgtgtacanangagtgcggcgnaggnacaacaacaagtgggnctgcgaggttcgtgtncncaacgncaantccacgangatttggctcgnaacgtatccaacgcctnanatggccgnacgnncgcacgacgtcnccgcgctctcncttcgaggtaagtcggcgtgtctcaanttcgncgactcagctngcggttgcccttgccggcgtcgaccaatgcgaaggagattcgg

SEQ ID NO: 4455 - DNA, 287 bp, Glycine max
  unsure (1)..(287): unsure at all n locations; Clone ID: 700559532H1
accgggtcacttccaagttcttctcctttcctctgttctcagtntggtccaactccatnaaatttttcttcacccaaatggatcaaggaanagattctgcanttanccagatgagnaaatccgttgagaagcttggntcttctgcagaggggtatggggaccctacgttgatgaggtttttgatagctcgatcgatggangtggataaancagcnnngatgtnnctncagtggangaagtggaggtctgccatggtgnccaatggattcatttcagaatctgaaatt

SEQ ID NO: 4456 - DNA, 284 bp, Glycine max
  unsure (1)..(284): unsure at all n locations; Clone ID: 700559533H1
gaagggagaagcaaaacctagaaatcgcgctcgttggttttgacttggagtgagtgggtgaaaccgaaaccctaactaatattgaagaagaagatgagcattcgaaggttgagtggcgaagaatcgcaaacactttactctctcctcagagcagagcagcgtccactccatgagatcctctcncgttcaactccgcaatcccttcctctcgccatttcantctctcttcctatctcctcatcctattgcaggacaataaggtgctcagcancactgagcggtta

SEQ ID NO: 4457 - DNA, 281 bp, Glycine max
  unsure (1)..(281): unsure at all n locations; Clone ID: 700559534H1
aaggcgcttccataaagccgctaatagcctccatcgcgacgggagtaatcctctggttctcacccgttcccgccggcgtgaaccgcaacgctggcaactgctcgcgattttcttaggcacaatcgtcggcataataacacaacccttacctcttggagcngtagcaatattagggttaggtgtntccgttctcaccaaaacgctacccttcgcngccgcattctccggcttcggcgatcccatcccctggctcatcgccctcgctttcttcttcgccaagg

SEQ ID NO: 4458 - DNA, 281 bp, Glycine max
  unsure (1)..(281): unsure at all n locations; Clone ID: 700559537H1
attggattctcaaatattcaggcagtgtcataatcggttggacttgganactngntgcttctgcagctagctccgtngcctccnccatctcattctcnttctcccaaatcttcattcacaagacanaatgggtngtcatggtagcaaggagaaaaaatcaaacacttcctatggatcagcagccactggtagtggtannnnnnnnnnnnnnnnnnnnnnnnacnacactgtncagccatcaccacctactaccgancaggttcaagcatcagcacagactc

SEQ ID NO: 4459 - DNA, 282 bp, Glycine max
  unsure (1)..(282): unsure at all n locations; Clone ID: 700559538H1
cattttccatgcaaacaccaaacncatatcagtaccctataggaaagnaacggatgcaaccattgngganttcttgttttngccnntgttatggcgacacttggactgcagataatcttggagtctacccgcacattaatatcttctgaaantgcantcaacttgaccanggaacaagagcgctgggttgtgggcattatgctttcagtgactttggtgaaattcctgctgatgatttactgtcgttcttttaccaatgagataattaaagcctatgcccag

SEQ ID NO: 4460 - DNA, 280 bp, Glycine max
  unsure (1)..(280): unsure at all n locations; Clone ID: 700559539H1
catatttctaaccacactcaaaaggcttcccttcctgacttggatttcattanattgctacactatattatttntattggtgaattgctanactatattctaaggacaattaaacatagactatatggggttgatggatgtggaccaaactcaattgttgtctaagatggtcatcggagatgnacatggtgaagcatcaccatactttgatggatggaaggctnatgatgaaaacccctttcatcccaaaganaatcctaacggggttatcnaaatgggt

SEQ ID NO: 4461 - DNA, 281 bp, Glycine max
  unsure (1)..(281): unsure at all n locations; Clone ID: 700559540H1
ggcggctgacggcaacgttagggagtccggagacgtcggcgggggccccggaaagantnatnttttctggttaacagcctncccaccctggaaacggctcagccggaggtagggtccagcggctggaagagcaccgcacgtcgcgtggtgtccggtgcgcccccggcgggcccttgaaaatccggaggaccgagtgcctcccangcccggtcgtactcataaccgcatcaggtctccaaggtnaacagcctctggtcgatggaacaatgtaggcaagggaa

SEQ ID NO: 4462 - DNA, 164 bp, Glycine max
  Clone ID: 700559542H1
gcaaagaaaaaagtgatgccaacaatcttcatatcagtttgaacaagaattttgtataactttgaacatgtttcaaattggatataattttgttcattctggcaatatttctgccaagagaagcaatcatgtcagtaaatttcaaacccttctttctcactgat

SEQ ID NO: 4463 - DNA, 153 bp, Glycine max
  Clone ID: 700559543H1
tagaagttgtgatggaacttgcgtgtaacattcttagcattctcaatgtcttaggtgcaaagagaagatgctaagtttgagatgatcttactatatttttcatattggaccgtcttcctctataattttgagttacagtgtccacttaaattg

SEQ ID NO: 4464 - DNA, 283 bp, Glycine max
  Clone ID: 700559544H1
ctttcacttaagattgttagtaagattgaagctggggaaaggttcagtgtgtatgttgtggttccaatgtggccagagggtgtcccagaaagtgcatcagttcaggcaatattggattggcagaggagaacaatggatatgatgtacaaggatgttgttcaggcgctccgggccaagggaatagtggaaaatcctcgtaactatttgacattcttctgccttggtaatagggaggtgaagaaacaaggagagtacgagcctccagaaagaccagatcctgata

SEQ ID NO: 4465 - DNA, 284 bp, Glycine max
  unsure (1)..(284): unsure at all n locations; Clone ID: 700559545H1
gagatgcagtagtagtagtgggtggtaacagagaagaaaatagggggtttggtttggtgagttacccaagagnaaggatgaagagggaacgcgancagcttggttccatcgcagggacctcaagctgcggttattcaagcggaaaatcgaatctttgggaggaagaaggaggcatggacgagcttcttgcggtggtgggttacaaggttaggtcatcggacatggcggaagtggcgcagaagcttgagcgtctcgaagaaaccatgggaaatgtccaagatgac

SEQ ID NO: 4466 - DNA, 271 bp, Glycine max
  unsure (1)..(271): unsure at all n locations; Clone ID: 700559546H1
gngaaattccacagggatctggctatcagcaacagtgtacgacttttngtagcaaccaaacanacagcaacagttcctggtccaacgatcgangccatctatggcgttgacacccacgtgagatggcaaaatcacctccctccaaagcacatacttccntggnncccctacgatccccaccgcgatgaccaactccacacgtggcattcccacagtggtccacctccacggtgggatccacgcgccagagagcgacggaaacgccancgca

SEQ ID NO: 4467 - DNA, 289 bp, Glycine max
  unsure (1)..(289): unsure at all n locations; Clone ID: 700559547H1
cttgtatgtggctgcagatatccaaaccttaaattcggtcctcganatctttctggatcattggttgtnttntattctttcanatacattccaaaatctcttggaaattgcgagattcactgcttatcctagcagcagattttgggttctgacccaattattcattttccccaactgggtcttgtggattttttgttggggttttaaatttcgtgttgctgggtttgaaagttatttcctttcttccccgtctggattcaactcccaagtntnnnngcnaattggggta

SEQ ID NO: 4468 - DNA, 290 bp, Glycine max
  Clone ID: 700559548H1
gttgctgagcattgactcagacaaaacagacgagtcagagttgcaaaaggggattgagaatgcctcaaagcttttatcagagttcaatacaagcgttgtggagtacacgagttatgcagacacaacaacgattccgggtcactacgtgatttattgggaattgttgaccaaggactcgacgaactcacccagtcacgaggtgttgaatcggtgttgtttggagatggaggagtgcttgaactcggtgtatagacaatgtcgtgttgctgatcattccattggcccattgg

SEQ ID NO: 4469 - DNA, 274 bp, Glycine max
  unsure (1)..(274): unsure at all n locations; Clone ID: 700559550H1
gagaaagagtgtgtttgtgttgacgagagagcttcacaaataaactcacaaaaccatatgatttttcttcttctgggtctttgagaccatgaagtagtagttgtagtagattatacccttttgagttttttttttcttctcttttttttttncnccaaaatcctnatttcccccgaantnnanacnagcnaagatcncttgnggggnatttganattnctttttttttcnaagtnnttgnaagnggnganncnagttngngagatataaanagc

SEQ ID NO: 4470 - DNA, 267 bp, Glycine max
  Clone ID: 700559551H1
cgcttcttcttttgctcgaatcatggagggtggttatgctcgtcgactccttgcaggtcggtataagatcaataaacaaagaagggcgtgaacaagccaaaaagttcggggtagagcagtttgaaatgcgacatttttcgaaagatcgtccatttttggaaaacctgaatctaggagaaggtgctaaaggagtatacatttcaatcgatgtggattgtcttgatccagggtatgctgtaggagtgtcccactatgaatcaggaggtc

SEQ ID NO: 4471 - DNA, 277 bp, Glycine max
  unsure (1)..(277): unsure at all n locations; Clone ID: 700559552H1
gtctccaactaatcatacagntccgntnatcanaatcatatctatagctaattnacttaantattttcatccctgctactcttcttctctcctctaaactctctnttccattcttgcttccnttgtgggttgtntgagtnnnctttccttcaatttaattganagatggcttgcntggtatctcgctcgggaagggaattgcagaggtacaacaacatgggtggccggcaagttgttgggtgagttcgggcgctattgtgtcttattgcgtctgcga

SEQ ID NO: 4472 - DNA, 277 bp, Glycine max
  unsure (1)..(277): unsure at all n locations; Clone ID: 700559553H1
tganattgattatgtcaagtttctgtgtggagatggttatagtggntttatggacnaaattaacaggagataataaaaccacttgtacaccagcaaatacaggaagtgttttggaccttaatctcccatcttttgctctatccacaactcgctcaaagtatattagtgccacttttagtagaactgttactaatgttggatcagctaaatccatatataaagccacagtaactacacctccatcatcttcttccttaaacatcaaagtagtgccaga

SEQ ID NO: 4473 - DNA, 279 bp, Glycine max
  unsure (1)..(279): unsure at all n locations; Clone ID: 700559556H1
cagattncgtcttaacgcacataaattcaggttcaaaatctcacctttgtngattttngcgagganttngagaatagntgtggctgggggtgctaagttcaatttgagaagaggcaatggttctnctcataatgttgtcaatggntatagcngtgatggagatcttntcagaattagcaaaagtgngtgtttttcggcggtggctgaggtggatagagacccttcttgcgtttnatncaccactttcaacattctggctccgatttacaaancngatng

SEQ ID NO: 4474 - DNA, 287 bp, Glycine max
  unsure (1)..(287): unsure at all n locations; Clone ID: 700559559H1
tgcatgccttgcttatgaagacccttctgcagcanattctgctggcggtntttacaanaattatgatttgangggntacaaaatcagtgttgcaatggcaganaaatctgcaccaagagctccacctgcatataaccaagggggcaataggggtggctatggtggagatagacgcagagacnattatagngntggangtggntctnggcctnataggcgtgatcattatggaaatcgttctcgtccatactganagcttngaccntgaacgtnttatgtactatgaa

SEQ ID NO: 4475 - DNA, 100 bp, Glycine max
  unsure (1)..(100): unsure at all n locations; Clone ID: 700559561H1
ctctatatatatnatgttaaagttttncttgttttngntggctttgggaatcaacttgtctttnttaatcaatgtantgaattggnnttgtntttnncna

SEQ ID NO: 4476 - DNA, 281 bp, Glycine max
  unsure (1)..(281): unsure at all n locations; Clone ID: 700559563H1
cagcagaaagaaattgagcagacaagagacttgataagtagattaggtgctggagcaaattctggccgtngcttcttctgccgagaagaagctggagagacttcaggaagaggaactagtggagaaaccttttgaacggaaacaaatgaaaatcaggttccctgagcgtggaaggagtggaagatctgttgtagcaattaataacttggaatttggctttgaggataagacacttttcaaaaaggcaaatcttacaattgaaaggggagaaaaaattgcca

SEQ ID NO: 4477 - DNA, 282 bp, Glycine max
  unsure (1)..(282): unsure at all n locations; Clone ID: 700559564H1
cacactgagaggaagagggagtgagagagagtgttctntcgtttgctaccttctcccagaaatggttacgttcaggtttcaccagtaccaggtggtcgggagggctctcccaacggaagcagatcagcatccgaagatctaccgaatgaagctctgggccaccaacgaggttcgcgccaagtctaagttctggtattttttgaggaagctgaagaaggtgaagaagagcaatggtcaagttcttgctatcaacgagatttttgagaagaacccaaccaagat

SEQ ID NO: 4478 - DNA, 277 bp, Glycine max
  unsure (1)..(277): unsure at all n locations; Clone ID: 700559565H1
ctcttactgtttaacagaccgaaccgcttccgctaaaccgtcttccgttgtgttcggcgactcggctgtnctctncgaaccgcccggttcactcctttggttaaaaaccctaagcttgatacgttttattatgttgagcttctcgggtttagtgttggcggcgcgccggttcgggggatttcggcttcactttttcggctcgactccaccgggaacgggggtgttataattgactcagggacttccgtcacgcgcctcacgcgccctggttatgtgg

SEQ ID NO: 4479 - DNA, 274 bp, Glycine max
  Clone ID: 700559566H1
aaatgaagttataatgattggagatagccttaaagatgatgtgccttgtggaagggcaagcaggagcctttacatgcttgcttgatcaaacaggagtatatgattctcccgagtatgctgatgttgaatttaaaccagatttcaaggtgacttcccttgatgaagttcactcagttctgaaggaaaattttgatttgtcaccatgatgtcaaggattgttaacgtgaaccattattttgtggtttatgcttgagatatggaggaggcatatatg

SEQ ID NO: 4480 - DNA, 271 bp, Glycine max
  unsure (1)..(271): unsure at all n locations; Clone ID: 700559567H1
gctacctcaacgtccccaanactgtgttcctgtncttcttcttcgatgncggcanncttcaanannactngnttntcaantctacattggnctgcnccgnccatgcctcaagcttgattctttcaattctcaatcttnctctgtcttcgaccccaatcttcgcctatccctctntcctcnnagaccctcacgcgccatcgtcgccatggcaggcaccggcaagttctttgttggggcaatggaagtgnaaggaacaaaagactccatcagt

SEQ ID NO: 4481 - DNA, 275 bp, Glycine max
  unsure (1)..(275): unsure at all n locations; Clone ID: 700559568H1
caacaacactctctcttctcgctcttggcttttcgctcttcactcacttctcattncatttcatttccaccgttcatggatccngtaagcgtgtggggtaacacgcccttggcgacggtggatcccgagatccatgacctcatcgagaaggagaagcgccgtcaatgccgcggaatcgagctcatcgcctccgagaacttcacctccttcgccgtcatcgaggccctcggcagcgctctcacgaacaaatactccganggcatgncgggcaaccg

SEQ ID NO: 4482 - DNA, 271 bp, Glycine max
  unsure (1)..(271): unsure at all n locations; Clone ID: 700559569H1
aggggttgcatgcnagttgttgagtggtttgtagcagaggggttgccgagacatggaactatggccttgcccttacagcagccacttctagctgccaagttcacattgnagcttatcttctgccacacgtacctcagcaggtccttgcagctcttagtgttgaaattcttaaggctgctggtgagcgcaggatggatctcttgatggtgtagcatttcttctccaatctganttcttangtgatcctgcagctacttatgctgttgcagat

SEQ ID NO: 4483 - DNA, 243 bp, Glycine max
  unsure (1)..(243): unsure at all n locations; Clone ID: 700559570H1
aagcatcataaattcatagtctttcggtccanccttcctacctccgctctagtgtatgccactctggataattatcatacccccttctaggcatagttcttctccctctgttctctattctacactgtgaaaccaagatgaaggtagcatttgtagctgttctacttatttgccttgtcctaagctcctccttgttcgaggtgtcaatggccggttctgctttctgctcctccaagtgcgcga

SEQ ID NO: 4484 - DNA, 271 bp, Glycine max
  unsure (1)..(271): unsure at all n locations; Clone ID: 700559571H1
gatgattggagcttggagagacaggatcataatgtgcacagggacatatgggcctactcctgcccttatcaaggcctttctggactccggtgccaaagctattgtttgtncttcaagtgaacctccagagtctcagtcgatcactgttgatggtcacatagagtggaatgtgatggaaaatgggaagtttgaaattggagaagatgaagcagatgatgagaacgtaccggctagtccggtaagcgactgggaagatagtgacgctgagaga

SEQ ID NO: 4485 - DNA, 273 bp, Glycine max
  Clone ID: 700559572H1
ctcctcaaaagctgtcgttcattgatgttgcaaaaggagttcggatgttttcaaaacttaaggtgccttgtgttgctgttgtggagaatatgtgtcattttgatgctgatggaaaacgatattacccatttggcagaggttcaggttctcaggttgttcagcagtttggaatacctcatctatttgatctccctattagaccaactctctctgcttctggagacagtggaatgcctgaagtggtagctgatcctcaaggtgaagtttccaaga

SEQ ID NO: 4486 - DNA, 276 bp, Glycine max
  unsure (1)..(276): unsure at all n locations; Clone ID: 700559574H1
cnacanagtcaactatgccaaagcatagttgtttgttgatacattngcatagttgactttgttgaatcgnaccacaacagggtagcgagtgttggggtcangatcaacagcaaccactganccggngcctttgtaccagtaagattccttcctaagaatcttcggccttcataaaaccaagcgcacgcttccgccactcactctcacccctcctatcccccactttcaagccatattcttcttcagcttcggccttagttcccgaacttgatattc

SEQ ID NO: 4487 - DNA, 266 bp, Glycine max
  Clone ID: 700559575H1
agagaaggtgtagacaaacacaatctctaatggcactcaggatgtgggcttcttccactgccaatgcactcaaagtctcttctacctccagacctcatctcttgcatcctttttctttctccagatgcttgtcttccgtcttggatggacttaagtatgcagattcacacgaatgggtcaagcacgaaggctcagtcgccaccattggtatcactgaccatgcccaggaccatcttggagaggttgtgtatgtggagctgccagaa

SEQ ID NO: 4488 - DNA, 275 bp, Glycine max
  unsure (1)..(275): unsure at all n locations; Clone ID: 700559576H1
tgcttatttaaaattncncaactttnacatacttcaaaaagacaattttaaataagcattatgacaaaagaagattcaaanttgtctttttgaagtatgtnaaagttgtgcaatttctttnttntttcttttgtttctctagtttttcttttctcaaaggactgatttgaaacaatctttatccttatgtnccatttgatacacagaatcgattcatgtttggggatgatgatattcccaggaatataaaatgtattcagttatgttcagaaaaa

SEQ ID NO: 4489 - DNA, 277 bp, Glycine max
  Clone ID: 700559577H1
gaaacgtcacttcaggtttgaaaaaggttacgaatgatatgaagactaagaatcgcaccgatagaactggagttgttggggctattgaaaaagaaactcctgcaagttcacgtgtgttttctaaagctggacctccaaaatttgaacttcaaatgggccgcaaatgggttgttgagaatcaaattgagaagaaagacttggtcattgaagattgtgattcaaagcagtctgtatatatttatggatgcaaaaactctgttttgcaaattctaggcaa

SEQ ID NO: 4490 - DNA, 279 bp, Glycine max
  Clone ID: 700559578H1
ttcactcccaagctccatggccgcaaaccttttacccctttcaatttcatgctcctctaaaacccacattctctgtcttccctcccctcccaaacccctctttctctgccgccactctctgctccgttaccgttccactccgcgactcacatgtaaggcagcccaagtttcggtcgccgaagagtcgtcggcgtccggcgacaactgggttccggtggtgcctctgtctgctctgccgaagggggagcggcgcgtggatcattcaggacggcgagacca

SEQ ID NO: 4491 - DNA, 280 bp, Glycine max
  Clone ID: 700559579H1
tacaaaggttgctgtaggagataagattgcagtagtgctaagtgctaacacctgcagtgaacaatggcctctgcatcagcatctctgctcaagtcttcacttgttcttgacaagtctgagtgggtgaagggacaaacccttcgccaaccttctgcatcagttgtgagatgcaaccccaccaccccatcaggcctcaccatcagagctggttcctatgctgatgagctcgttaagaccgcgaaaacagtggcttcaccagggaggggtattttggccatgg

SEQ ID NO: 4492 - DNA, 285 bp, Glycine max
  unsure (1)..(285): unsure at all n locations; Clone ID: 700559580H1
gcttccttccttcttcaaacgcaacgaagtttctttccactttcaaaattcccacccgcccctttgttctctccgtacaacattcatcacaccctgattctgggtcatttaaatccccgaatcaggggctcganctcgagccgattcggctcgaggccttacaaaacaagtttttgtataaagcagcctgaaagagtttccctttttccttgcagatcatttcagcaataactggagggattactgatctctcttttaatgcagttggctatgcttggcagacag

SEQ ID NO: 4493 - DNA, 272 bp, Glycine max
  unsure (1)..(272): unsure at all n locations; Clone ID: 700559581H1
gntngttgatcgagataactagaaacagtgtgatgaaaatgaaggtccttgtnntctttcgttgctacaatnttggtagcatggcaatgccatgcgtacgatatgttccctctccgaatgaacactggctatggtgcccgtactccggaggtgaaatgcgcaagttggaggcttgctgtggaagcacacaacatctttggctttgagaccattcctgaagagtgcgttgaagcaacaaaggaatacatccatggcgaacaatatagatcaga

SEQ ID NO: 4494 - DNA, 249 bp, Glycine max
  unsure (1)..(249): unsure at all n locations; Clone ID: 700559584H1
tgaaacttgtgatgtgaaatgaatnnctataagantatataggnattgaaatagcgtgtgnctggaaatagaaatctgagaatgattgcaagaagtggatattggttgaagcatgtattggacaagccaatattgatgggtgtatggttgaagtgttaaggttgtgtctgaagtatttttnttacttttgagtgttatcctgtttcacggtggtcaatctttgtnatatcatgcttgctttggttgcat

SEQ ID NO: 4495 - DNA, 270 bp, Glycine max
  unsure (1)..(270): unsure at all n locations; Clone ID: 700559585H1
ttttgcttcagcgtttctgctaatatttttctctgaactgggagacaagacctttttcattgcagcgctactannagctaggaactcagctggtgttgtttttattggaacatttggcgcacttgcggcaatgactctgatntctgntgtccttggacgaacctttcattatgttgatgaaatcttgccattcaggtttggagaaactgatttacccattgatgatattgctgctgtttgcctattggtgtactttggggtctctaccct

SEQ ID NO: 4496 - DNA, 271 bp, Glycine max
  unsure (1)..(271): unsure at all n locations; Clone ID: 700559586H1
gcaaaaccctgacatgcatcatgagaccacttataatctttataatccagcagcaggatatgagcctggtcaggatgggcagcagctacattctgcaaacaatgnagcagttangctagagaatgatgcagtttctttacaaggagtacatatgaaaggggatggaattaatggaggagacttgcaatattttggtaaagatgcatttcanaatgagcttgatagacctatggatcactccttctttggatcaccccttagcatgtcatta

SEQ ID NO: 4497 - DNA, 272 bp, Glycine max
  unsure (1)..(272): unsure at all n locations; Clone ID: 700559587H1
gtcgtgcgctgttcctctgtctgtcgtttttgttttcagaccaaaccctagctccgcatcgcaaccatgtcgaccaagcaaggtggaaaagctaagcctttgaagaaacccaagtctgataagaaggattacgacgaggttgacatggctaacattcagaagaaaaaggaagaggagaaggcgctaaaggagttgaaagccaaggcgcaacagaagggaagctttggaggttctgggctcaagaaaagtggaaaganataagggctctttat

SEQ ID NO: 4498 - DNA, 273 bp, Glycine max
  Clone ID: 700559588H1
atacactacactaggctcacgattcatccaaactgaaatggcggcagtagtatcagcatcttctcatctattgtttgttcttcgttcacaaccattatcatcatcaccctctttcatttctcttctcaaacctcttcttgtttcttccccctatgctgtatctacaccccttcggcatatccaagttccaccgcttcgaaaacctctcttctctacttcctcttccccctcccttaccgtttctcaagatagtgaagaattggaagaaaaaga

SEQ ID NO: 4499 - DNA, 274 bp, Glycine max
  unsure (1)..(274): unsure at all n locations; Clone ID: 700559590H1
cagaacatccacaccgcatcgctcgtggttccatcctttgtgtctgtctctctcttcggacacanagcaacactttccatgtccatgtctctgnctcttcttcgtatcttctcttcgccccaccntnccacctctctcttctttncaactccaactctttcttccctctgcccttctttcctttccaaattaccaaatgccccctctcccctcatgttttatgccacagggacgcctgcagcttcgaagcaaggtcacctcggagtccctgaag

SEQ ID NO: 4500 - DNA, 274 bp, Glycine max
  unsure (1)..(274): unsure at all n locations; Clone ID: 700559591H1
gttttactacgacggccaaggcttcatgtctgtgcatatttctcaaactcagcttcgcnctgnttcntgtcanctctccatccttcgaaganncattnnccanaatctacacggnacctngcntgcagaagaagtggtacaacgttttgggaaatcatgactanaggggnaatgccnaggcncaaatnagccatgtccttagatacagagncaatagatgggngtgcttcagatcatataccctcaattcagaaaatgtagacttcttttntgt

SEQ ID NO: 4501 - DNA, 274 bp, Glycine max
  Clone ID: 700559592H1
gtccaggatcgcacattgttgtccttgcgttcgtgttgctcatttcatcaaaacttgcagaatgtcacaacatagttcgcttccttcctggcttccagggaccccttccttttctacttgaaactggttacgtggaagtgggtgaaactgaagcagaggagcacgcagaactcttctattattttatcgagtcagagaacgatcctaaagggaaccctctcctactttggctaaccgggggtcccggttgctctgctttctctggccttgtctt

SEQ ID NO: 4502 - DNA, 275 bp, Glycine max
  unsure (1)..(275): unsure at all n locations; Clone ID: 700559593H1
aattgttgtaactttttgattcctaaattctctaaaattcgnaattctaatntcgttaggggnaagagattgtttgtgtgtgagtgagtatggctggaaaaggcgagggtcctgctatcggaatcgatttgggaacgacgtactcttgcgtcggcgtgtggcaacacgatcgtgttgaaatcatagccaacgatcagggtaacagaactaccccatcctacgtggctttcaccgacacagaacggttgatcggcgatgcggcgaagaaccaggtt

SEQ ID NO: 4503 - DNA, 279 bp, Glycine max
  unsure (1)..(279): unsure at all n locations; Clone ID: 700559594H1
ggggatgntccactcatagaactcaacataganactggaactagaagtagcagtcactaagtnttgtgcatanccttanaccatgtcattgcctaccactactagtggtcactcatctatttactctgcacttacattgccaagaaccacccaaattcacccaaccttgttttctcccaccaccaagttcttttcttccaaaagcccctcatattcaggtctttccaattgtttctcaaacacccttttgtcaagacctnngnngnnttgctgtcaagg

SEQ ID NO: 4504 - DNA, 285 bp, Glycine max
  unsure (1)..(285): unsure at all n locations; Clone ID: 700559596H1
cacactgagnaggaagagggagtgagagagagtgttctcgtttgctaccttctcccagaaatggttacngttcagggtttcacccagtaccaggtggtcgggagggctcctcccaacggaagcagatcagcatccgaagaatctacccgantgaagctctgggccaccaacgaggttcgcgccaagtctaagttctggtattttttgaggaagctgaagaaggtgaagaagagcaatggtcaatttcttgctatcaccgagnttttgaaagaacccaccaagttt

SEQ ID NO: 4505 - DNA, 296 bp, Glycine max
  unsure (1)..(296): unsure at all n locations; Clone ID: 700559601H1
tggttttccaaacaaacattaatcgctcacttcgtanngtttcctcncatgggcncaaggccacanggtccccangatggncattgcaagacnattggcacggcgtggngtgatngtttccanattcaccaccccaaaaaangcatcacganncaattctgtncntncncgtgatgtttcatcaggcctcccaatccggctagtacaatccattttccatccaaagaagcaggactacctgaaggtgtgagaatttggacatggnagcctcaancgatttgtacaaaanattccac

SEQ ID NO: 4506 - DNA, 296 bp, Glycine max
  unsure (1)..(296): unsure at all n locations; Clone ID: 700559603H1
cgagnaaggaaggaaagaaacaaggtgacatcancatggcttgctcgttttctcgcgggtctctgcntcctctncnccatcatcgtttccntaggatgtctatntgcganttccattgcaaaggnggaagccaccaagttggggacggtcattgggattgatcttggaacgacctattcatgtgttngtgtttacaagaacggccatgttgaaatcatagccaatgaccaaggtaacgtatcaccccttcttgggttgctttcaccgacagtgagagactcttggggagctgccaa

SEQ ID NO: 4507 - DNA, 299 bp, Glycine max
  unsure (1)..(299): unsure at all n locations; Clone ID: 700559604H1
caacacttgtctgttttcccttctttccgtttccnggatttcggtttctctccctattttatccccagaaaatggnantnccgccggcgagtcctccgtcccgctcccnccggcgaacctttgaagcccaaacaggnccctaactccnnnnnnnnnnnnnnnnnnnnnnnatcgtacctcaccaacgccgtgttcttcgggctgttcttctcggtggcgtacttcctcctccaccgatggcgcgagaagatccgcaactncactcccttcacgtcgtcacgctctccgagatggccgnc

SEQ ID NO: 4508 - DNA, 298 bp, Glycine max
  unsure (1)..(298): unsure at all n locations; Clone ID: 700559605H1
ttctcacnctcctcttcanacattntctgtgcgcncnaanaaacantcncgttcacnctttcaganngtgtgaagatgggggcgggtggccgaactgatgttccgnctgccaacangaagtcagaggttgacccnttgaagcgggtgccantngaaaaacctccatntagtctcagccaaatcaagaaggtcannccacctcactgntnccagcgttctgttttccgctcatnctccnatgtngtttacgacctcaccatagccntctgcctctatnatgttgccacnattacnncca

SEQ ID NO: 4509 - DNA, 298 bp, Glycine max
  unsure (1)..(298): unsure at all n locations; Clone ID: 700559606H1
cgatttgaagtgggttattgttgtntgtggatttcntcattgttttgctctanaaatggagagagattttactgggtctgagctcaaaagaaccattggcnatgatgaaggaagagatgaatattgatattggaagcaaagacacaggtntcacaaatggagcagtggtaaaatggcccttcatgaacaaagtatatgtccatcctctnttgatgtcattcaatcctcctcaggtgaattctgtgaaccatcctcatggtatgaagatgttttcagttcccaatcaagcaatttcagt

SEQ ID NO: 4510 - DNA, 299 bp, Glycine max
  unsure (1)..(299): unsure at all n locations; Clone ID: 700559607H1
ggacacatccatccatggcttccctatnatcatcncgantcanaggacngttnaacttagccaaactccagattgtgttcctacncttccatncncattactcaacaagaccctnatttcttttctcnncnctcaacaaattctatnnctactccaattctctgcgctgctctgcctccgtggaagacaccgaatgggattgggaagatggcaaaaccatttccacgtggtcgatgaancagagcttctcctcganattctcaagtctcgcttaggtgatgctctgcgtttggaggatt

SEQ ID NO: 4511 - DNA, 294 bp, Glycine max
  unsure (1)..(294): unsure at all n locations; Clone ID: 700559608H1
agggccttccatggcttccgcntgtgcttcctctgcaattacagctgttgccatctctacgccgagttccgggcagaagaatggatcaggaggttgttttcttagtggaaggaaattgagggtgaaaaaggagagagcagcaattggaggacgatcgatgggcactacagtgtgcgcagttgctgagcctgacagacctcnatggttcccaggcagcaccccncctccatggcttgatggcactctacctggagacttcggctttgaccctcttggtcntggatctgacccgga

SEQ ID NO: 4512 - DNA, 290 bp, Glycine max
  unsure (1)..(290): unsure at all n locations; Clone ID: 700559609H1
ctatttgnntnttntattataaatntnattcatatgaatatttcctgagaaaaaaaaaatnatgtaattggttgatnggaagtgtttgtggttaatttcatagactgaagttttnggctttttaatttcatagactggttaatgaatttaatcaattnatnaatctggattttnatgttttntcaaatggattgagtatacaatctgttgaatataaacggtgctgttgatttggaagtcaatgggtgtggttttattttactggattggatcacttgngatctgtgagg

SEQ ID NO: 4513 - DNA, 292 bp, Glycine max
  unsure (1)..(292): unsure at all n locations; Clone ID: 700559610H1
cgcgaagtggaggaagcagtcgataaagaagctggagtcgtcgctgaagctctacgaggcgngcagcgcccccgcactggccattaaggcgagcgtggagaagacgaagaggaggttcgacaactacgcgaacaggggttgctgtgcggcggcgatgggttgccgcacctgatcgtgagcggagaccagaggcactggggtgagttcatcacacccggaatactattcctgtacatctcgggatggatcggctgggtgggtcggagctacctgattgcgatcagggacgaga

SEQ ID NO: 4514 - DNA, 290 bp, Glycine max
  unsure (1)..(290): unsure at all n locations; Clone ID: 700559611H1
cgcccccggcggcccttgaaaatccggaggaccgagtgcctcccacgcccggtcgtactcataaccgcatcaggtctccaaggtgaacagcctctggtcgatggaacaatgtaggcaagggaagtcggcaaaatggatccgtaacctcgggaaaaggattggctctgagggctgngcacgggggtcccagtcccgaacccgtcggctgtcggtggactgctcgagctgcttccgcggcgagaggggtcgtcgcgtgccggtcnggggacggattgggaagggnccttcgg

SEQ ID NO: 4515 - DNA, 292 bp, Glycine max
  Clone ID: 700559612H1
caacaacaaggagaacgaagacaacaccaccaccaccgtcgtcttgaaggtccaaatgcattgcgacggttgcgcttccaaaatcatcaagcacctccgcgctttccaaggtgtggagacggtgaaggcggagagcgacgccgggaaggtgaccgtgaccgggaaagtggaccccacgaaagtgagggacaacctggcggagaagataaggaagaaggtggaatggtgtctccacagcccaagaaggagaaagagaacgagaaagaccccaaacccaacaacaaatccgaga

SEQ ID NO: 4516 - DNA, 284 bp, Glycine max
  unsure (1)..(284): unsure at all n locations; Clone ID: 700559613H1
ctcgaggctncctcttcncgccactnctctgcctcggaatccgctcttttcacaacaccnangacgacggcgcnttnttccactattcagaagcgccggagtacngaaacggagcnggttgccccgttncgtcaacncgtgnttccctcccttcatggganncttctctggtcnacatcnncatgannctcgacnccggcnacntccgcggcnncatcgncgccgtgaactccgtcctccgccactnctcgtgcncggaaaacgtcttcttccacttcatcgcc

SEQ ID NO: 4517 - DNA, 281 bp, Glycine max
  unsure (1)..(281): unsure at all n locations; Clone ID: 700559615H1
gcttccaaaagatcacgtggatgccaaagtgagacgacaaaacgaaaatacggagattgttatagtgaaagacttcgaaaatagtgacttagagtcagaacaatgatgtaaatanacataatgagaatagcnaaagttgccatcatgtaatttctacggtgaaaganaacatgtatctnctactaatcctctttcctgacagtgctaagccacagtgctttttaactttagaaagatcagatttatataantcatcttgaagaagtccttgaagctcaaaa

SEQ ID NO: 4518 - DNA, 297 bp, Glycine max
  unsure (1)..(297): unsure at all n locations; Clone ID: 700559616H1
gtgaaatgaaggccagacatatctcattcttctcttgatctttctgatggcactcgctgcaaacaaagtttcaagcagtcctattgtgactaatagaacagctctttgtagatcaggtgaaaaacactatttttcctcgtcaacaagggtcaatagaatacagttgtcaagacatagactggaacatggacatctgaactatagatgtctccacagagagagatcaaccttattcaatgactggttttggttcataacggaaaacctgttggtntntctccaagaagaaatcttcta

SEQ ID NO: 4519 - DNA, 295 bp, Glycine max
  unsure (1)..(295): unsure at all n locations; Clone ID: 700559617H1
ctatttttntntntnattatanattttattcatatgaatatttcctgananaaananaattatgtaattggttagattggaagtgtttnggggtaatttcatagactgaagnttttggcnttttaatttcntagactggttaatgaantnaatcaatttattnatctggattttnatgtnttgtcaaatggnttgngtanacaanctgtngaatataaacggtgctgttgattttggaagnccatgggtgtggtttgatttacgnggatggatcactgggnatcctgaagaaccc

SEQ ID NO: 4520 - DNA, 296 bp, Glycine max
  unsure (1)..(296): unsure at all n locations; Clone ID: 700559619H1
gagcacttggcaagctgaggagagangctgagcgtgcaaagagagcnctcagcagccagcaccaggtccgtgtggaaattgaatcactntttgatggtgtngatttttcnganccactcacccgagctcggtttgaggagttgaacaatgacttgntccggaagaccangggtccagtgaagaaggctatggaagatgctngattncagaagagtcagantgatgagattgntcttgttggtggaagcacaaggattccaaaggnacaacaacntttgaaggactactttgatgga

SEQ ID NO: 4521 - DNA, 294 bp, Glycine max
  unsure (1)..(294): unsure at all n locations; Clone ID: 700559620H1
cttccttttctcttctctgtctaaggggtgccctgagatcacatngaacaatggtgaaggctgtggccgttcttggcagcagtgagggtgtcactggaactattcacttcgttcaggagggaagtggtccaaccaccgtaactggatctcttgctggtcttaagcctggtctccatggtttccatgtccatgccttgggggacactaccaatggttgcctctcaactggatcacatttcaatcctaataacaaggagcatggtgcccctgaggatgagaatcgtcatgctggtg

SEQ ID NO: 4522 - DNA, 294 bp, Glycine max
  unsure (1)..(294): unsure at all n locations; Clone ID: 700559621H1
anagcaattgagaagaaactgccaaaaagtgatgttctgcnaatacctgcaaagccagacaatagtgaaggngtaaaaactaaaagannagcgccnccttcaaaaaagaggaaaattgccncattacccccncaacctaaagttatgccacctacaaagaaggttatgtcggatcaagagaagcatgatctaggtcgaganttggagtctcttctgggagaaatgcctatgcatatcattgattncttaaaagaacatagttcaaatggtagagaatgtggagatgacgagatg

SEQ ID NO: 4523 - DNA, 90 bp, Glycine max
  unsure (1)..(90): unsure at all n locations; Clone ID: 700559622H1
accctacctccctttccccccccctcttcncgtcttttcgnaaccnactncatctnggatactngaanagtgtgccaatatganctctng

SEQ ID NO: 4524 - DNA, 292 bp, Glycine max
  Clone ID: 700559623H1
gagagagagatggagaagccaggaggaggaggagtgttatcggcgaaggaggcattcgagaagcttgaaaaggtgggagaagggacatatgggaaggtgtacagagcaagagagaaggccacggggaagatcgtggctctgaagaagactcgtctccacgaggacgaagaaggtgtccctcccaccactctccgtgaggtttccattctgcgaatgctactctcgcgatccccatgtcgttaggttaatggatgtcaaacaaggtcagaacaaggaagggaagacatgctct

SEQ ID NO: 4525 - DNA, 281 bp, Glycine max
  unsure (1)..(281): unsure at all n locations; Clone ID: 700559624H1
ggatttgaaatccttggcgaatatatgcaccttacattctttatacatgccagcanaccatttgactgaagaccttccatcaatccttcataatttgtcnagtggttgtgttagacactcattacaagatttggttttgtcatttaatcaaatcactggctctttacctgacctttcagnattctcatctctaaaaatattggttctcgatatgaatcaattaagtggaaacanacctgaaggnntccgcttaccaattcatttggaatctctgtcaatcc

SEQ ID NO: 4526 - DNA, 291 bp, Glycine max
  unsure (1)..(291): unsure at all n locations; Clone ID: 700559625H1
ctgccgtggtgctttcaccactgcttaccactaaccttcctctcactctctgccgctgcaagcttggctttatttccccaatggccgcttgtggctatananctgcngccaacttcaattatctcgttggcgccagaaacatanccaaattcgcttcttcagacgccacaattncgttttcatntggcgggagcgactcaatgggtcttactttgcgacccgctccgatncgtgctcctaagaggaaccatttctctcccttgcgtgtcgtttgcgtcgattatccacgcc

SEQ ID NO: 4527 - DNA, 291 bp, Glycine max
  unsure (1)..(291): unsure at all n locations; Clone ID: 700559626H1
atttcatcctctggggtgttacaactcaccaaagttggcagcaacggcgtgcccacctncgggatctctcggtcgtgccctttacgctgccccaatccagatttgggacagcgaaaccggcaaggtagccagctgggctacatcctttaaattcaacattttcgcacccaacaaatcaaactcagctgacgggcttgccttcttcttggcacccgtcgggtctcagccccaatccgacgatggatnncttggtcttttcaacagtcccttaaaggacaagtctctccaaac

SEQ ID NO: 4528 - DNA, 289 bp, Glycine max
  unsure (1)..(289): unsure at all n locations; Clone ID: 700559627H1
tgacacataaganaagagagctggaaacggctatgctgggacctaatgcagatatgctaganatctatggtaccgtaaatccagaacctgattcanttttgttagaggctgagaagtggaagaaaatgatggaaanatcatctagaggggatttgaaagagangctttatatgtgtgcaaaagcaatggctgtgaatgatatggagacaactgattggctggtgtctgagttgcgtaagatggtgtccatttcgggcaatccgattcagcgactgggagcatacatatt

SEQ ID NO: 4529 - DNA, 289 bp, Glycine max
  unsure (1)..(289): unsure at all n locations; Clone ID: 700559628H1
accattnnntctccttttncatntctnacagccaaggttgntgtactagttgtattgttgtatctganacactctcaatgtgttcctgaagggagccatgagancntnagcattnctncngattttncatctccntgtatctcccaccattgtcaaatctctctctctcccccaccctccatccaatggtacttnggacccaaaacaagcaatggccctagaatcccncaacatccccacctcaaaggacccctgcgcccaaccctccttccacaatgcnaccctctgc

SEQ ID NO: 4530 - DNA, 290 bp, Glycine max
  unsure (1)..(290): unsure at all n locations; Clone ID: 700559629H1
cttcttctcttgcggctagggtnttagcgcacttgcttctagatnnaaggaagatgggtaaggaaaaggttcacatcagtattgtggtcattggccatgtcgactctgggaaanccactaccactggtcacctgatttacaagcntggaggcattgacaagcgtgttattgagaggtttgagaaggaagctgctgagatgaacaagaggtctttcaagtatgcctgggtgctggacaaacttaaggctgagcgtgaaagaggaatcaccattgatattgcnttgtggaag

SEQ ID NO: 4531 - DNA, 280 bp, Glycine max
  unsure (1)..(280): unsure at all n locations; Clone ID: 700559630H1
aaagtttatgtcctctgatcgtgtggtttctgagttctaagcactcacctctttcatacacgtttgttcgcttgttgagaagccatgggcgaggatttcgagttcccaagtgctggcaacatggaaatgcctgaggaggaagagtttgncagtccgatcctgaaggttngggaggagaaggagattgggaaaatggggctgaagaagaaattgctcaaggaaggtgaaggttgggacacccctgacagtggagaccaattgaagtgcattatactgganc

SEQ ID NO: 4532 - DNA, 245 bp, Glycine max
  unsure (1)..(245): unsure at all n locations; Clone ID: 700559631H1
gagaatgttgagtctctcagntgcttcaccttcttcnncaaccatttcctttctcccaaagccattcaatggcattcagctccgtcgcactgccacatgctccatcccacccacgangcgcagctcanttgtgccggtggtggtgatgtctaagaggacggaggaattganggaaattagacaaatgactacggnacgnattaacgaagaggttgtcgaccttaagggcgagcttgtcatgcttc

SEQ ID NO: 4533 - DNA, 298 bp, Glycine max
  Clone ID: 700559632H1
cacagttcgtcggaatgggaagggtgattcgcgctcagcgtaagggtgctgggtcggtgttcaagtctcacactcaccaccgcaagggtccggcgaggttccgcagcctcgacttcggcgagcgcaacggctacctcaagggcgtcgtcaccgacatcatccacgaccccggtcgcggcgcccctctcgccaaggtggcattccgccaccccttccgctacaagaagcaaacggagctcttcgtcgccgccgagggcctctacaccgggcagttcgtctactgcggcaagaaggccac

SEQ ID NO: 4534 - DNA, 295 bp, Glycine max
  unsure (1)..(295): unsure at all n locations; Clone ID: 700559633H1
cacttactggaagccttgttgtgagtaagagaaaaggcttcctgcaccgagcacaccaacttgatacctctgattcttctttgcttagaattccacagantatggagangcnttcttttcaatcactccccacctttggaattcaagggtttgagcaaggaggaggaagactcattgctagggcaagtggaaatatggaggtacatgacatgcttcacggactccgtggccttgaaagctgtcatagagcttcgtatagcggacatactagaccgttatggtaaaccatatcctg

SEQ ID NO: 4535 - DNA, 294 bp, Glycine max
  unsure (1)..(294): unsure at all n locations; Clone ID: 700559634H1
cttattcagtagttcttctctctcgaatttncactcactttctgtgcatcaatggcggcgataagtctccggaaggggaacacgcggcttccgccggaggtgaaccgcgtgctgtacgttcggaaccttcccttcaacatcaccagcgaggagatgtacgacatctttggcaaatacggcgccattcgccagatccgcatcggcaccaacaaggacactcgcggaaccgctttcgtcgtctacgaggacatctacgacgccaaaaccgccgtcgaccacctctccggcttcaac

SEQ ID NO: 4536 - DNA, 293 bp, Glycine max
  unsure (1)..(293): unsure at all n locations; Clone ID: 700559635H1
agaagcaaaactgaaggttgccataaacggatttggaaggattggaaggaacttcttgaggtgctggcacggtccgcaaagactcccctctngatgtcattgccatcaacgacaccggtggcgtgaaacaagcctcncaccntctcaagnacgattcgatcctcggaaccttcgatgctgatgtcaagcctgttggcagcgacatcatctctgtcgatggaaaggaaatcaaagttgtctctgaccgcnaccctgccaaccttccttggaaggatttggggatagacttggtg

SEQ ID NO: 4537 - DNA, 291 bp, Glycine max
  unsure (1)..(291): unsure at all n locations; Clone ID: 700559636H1
gtaaagtcaggcacaggcatttggtggctcttttagggtattgcattaacggcaacgaaagacttttggtgtactagtatatgcctcaagggacattaacgcaacacctgtntgattggggtgaaaatggttgtgctcctttgactnggaaacaaagggtagcaatagcnttggatgtagctcggggagtggaatacttgcacagcttggctcagcaaagcttcattcacagggacttaaagccctcgaacatattgctgggtgatgacatgagagccaaggttgcagatt

SEQ ID NO: 4538 - DNA, 192 bp, Glycine max
  unsure (1)..(192): unsure at all n locations; Clone ID: 700559637H1
ctatcctcaactagtgaaatncctncttctctntccacgagccaacaacaancntcattgangcaatttctgtncccananataatgcccgggagaaggagaaggaagttgaaatcgttgagtgatacaattaccgacagcagacgggcatcagtggaggtggaaaatgaatatttagagctgcaaacntgg

SEQ ID NO: 4539 - DNA, 294 bp, Glycine max
  unsure (1)..(294): unsure at all n locations; Clone ID: 700559638H1
tggcagcgtcactacaagcagcagctactttcatgcaacccaccaagttgagcaggagcaacatttgcagcaaaagtctacttcagtccatttccaaggctttggttttggacctgttggagctaaaaaggncacatgctccctncaagctgatcttaaggacnttgntnanaaaggnggttgatgtacccaaantgnnnggattcngccctnggcaacnntgnccncngttgtncnngggggcaaatgcnnaaggngtncccaaaaggntaaccctttcgacgaantccaaac

SEQ ID NO: 4540 - DNA, 288 bp, Glycine max
  unsure (1)..(288): unsure at all n locations; Clone ID: 700559639H1
attgcgtgcacccatgtcctcnnntctctcctnatcannctctgcgccctcccnccacgantcttccttcctccatggaacaaagctctttcccttttctcgaagagtggcacnacgccgcntcaactctncctctgncaagtgntcncncgaccacatncccaaacagttnaganagganaatctcaaagatggattgatggannactacnagaatgcacctcnatctcnatanggcctttntccttcanaaatggacatgntcatgacagnngatcatcctatncg

SEQ ID NO: 4541 - DNA, 288 bp, Glycine max
  Clone ID: 700559641H1
gtgaggtgaaaaaactttttgaacgctctcatgatggtcaaatcactgagatagtttacaagggaacacatgatcatcctaaacctcaatcaagctgccgatactctactggtactgttatgtatattcaaggagagagatctgataaggcttctttggctggccgagatgacaaagcatccactatgtatggtcaggtgtctcatgctgctgagcccaacagtactccagagtcatcacctgtagccacaaatgatgatggtttagagggtgctgggtttgtgtcaa

SEQ ID NO: 4542 - DNA, 267 bp, Glycine max
  unsure (1)..(267): unsure at all n locations; Clone ID: 700559642H1
ccaatctcaaacagtgcaaaaacactgcgaaatattttcaaccgcaaaacaaataacatncaatttccaaaattgccataatcaaccatagctgaacagaagaagtcagtaaccatcgtcgtgagcgaagatccataataatacagttacaaattgcaataacngctcttgtggttatcgaatttgatcgcagcgcgagaagaatggaagttnggacgatctgaacancccagtgctttnaccctgtgagtgaatggcgcgagangc

SEQ ID NO: 4543 - DNA, 286 bp, Glycine max
  unsure (1)..(286): unsure at all n locations; Clone ID: 700559643H1
gatgagtattacagtcttgttttgaacttcaaagaagccgtttttggggtggaaaaggagatagagattcggcgattagagagctgtggaacttgcaatggttcgggggcnaaaccaggaactaaatcatccaagtgtagcactngtggtggtcagggtcgggttgtcacatcgacaaggactccattaggcatctnncagcagtctatgacatgctcttcttgcaatggaactggagaaacttcaacaccttgcagcacatgttctggggaaggtcgagtgagaa

SEQ ID NO: 4544 - DNA, 286 bp, Glycine max
  unsure (1)..(286): unsure at all n locations; Clone ID: 700559644H1
caganaacgcatgttgctgcacaatattgtcagacagcttncctttaccacattgtttcaaaatagaatgctnacncngatgttccngataatgatggaagangcccattncattgggctgcttacaaaggttttgccgattctatacgtctnctgtnatttcttgatgcacacaggggacgtcaagataaagagggttgcactcctcttcattgggctgctattaggggcaacttggaggccagtaccgtgttagtacaggctggcaagaaggaagatcttatgg

SEQ ID NO: 4545 - DNA, 288 bp, Glycine max
  Clone ID: 700559645H1
aaaggattctacccgccgctcgatgggaattgcgcttcaaggcgtctcgtagggctaatccgcctcacgagggtcaccaacggcacgtgcctttggggggccgaggccccctactgctggtcggcaaacggacggcgggcgcacgcgtcgcttctagcccggattctgacttagaggcgttcagtcataatccaacgcacggtagcttcgcgccactggcttttacaaccaagcgcgatgaccaattgtgcgaatcaacggttcctctcgtactaggttgaattacta

SEQ ID NO: 4546 - DNA, 286 bp, Glycine max
  unsure (1)..(286): unsure at all n locations; Clone ID: 700559646H1
cgtagtattanttcatcgattctctcccttctctttctctctgcgacaccagatgatggagacgacggcgaangaaaacgctgtcgttgcgccaatcgcggcgttgttgttggtggtgctactcgcggcgagtgtggtggtggaggctcaggagaactcggacgtgaagacgctggtgaagcacatgcacgggaagaagtactgcgacaaaggatgggaatgtaagggctggtcaatttactgttgtaacctcatattactgattatttccagacctaccagttcg

SEQ ID NO: 4547 - DNA, 290 bp, Glycine max
  unsure (1)..(290): unsure at all n locations; Clone ID: 700559647H1
cgtcaatcagttgagcaggctcgctttaaaggaataactgttaaagcaatggtgatcataaatcctggaaaccctactggtcaatgccttagtgaagctaatctaagagaggttttgcaattctgtnatcaagaaaatttagccttgcttggagatgaggtttaccagacaaatatatatcaggatgaacgacccttcattagttctagaaaggttttgatggacttggggccacctataagcaaggaagtccagcttatttcttttcactccgtgtcaaaaggttatta

SEQ ID NO: 4548 - DNA, 65 bp, Glycine max
  unsure (1)..(65): unsure at all n locations; Clone ID: 700559648H1
ttatttggcaatgaanatctagaatcttgattttgattttntngtcttctaattctattaagtga

SEQ ID NO: 4549 - DNA, 291 bp, Glycine max
  unsure (1)..(291): unsure at all n locations; Clone ID: 700559649H1
gtgatagttganttngnagtagtgcttcgcgtctacattcagttcaatggcttcttccatgctgtgctctctcgccttccgtccaatcacagctcactaaaaccaccctcgttgctccaatccctctctatcaacgaagcaagtgcgaaatgagcaggaggagttttgcgtttaagggaattgtggcctctggcgttncgntcgcggcttctactctcacagccgaagcagaaccatcttccaaaggtnttgaaagattgccgtacaanccggaagggtacaatattggnc

SEQ ID NO: 4550 - DNA, 290 bp, Glycine max
  unsure (1)..(290): unsure at all n locations; Clone ID: 700559650H1
gttttttcggatactgccgtggatttgaagcttanccnttcctcaacctcaaacagtgcttcttctgacctgactaaagagaagaacatcactgctgctgcacctcctgctaacgacccagcaaagccacctgcaaaggcacaagtggtngggtggccnccagtgaggtcttttccgnaagnaacattgttcnaaagngntaccaccatngaggcngaanaggcggcnccaagtagtncaacnatgnggacccggagccncttcgtgaaggtnagcntggatggtgctcc

SEQ ID NO: 4551 - DNA, 291 bp, Glycine max
  unsure (1)..(291): unsure at all n locations; Clone ID: 700559651H1
ggtggatcgtggaggaccgccccgacggcaccaacgtccacaactggcactggtccgagaccaactgcctncgactggtccaaaaccttctncagcaanctcctctccaacctccctatcctccacggcgaggctaacctctncctcaaaacgacgtcgctccgctccctcgacggcgaggcctacgtcaacgtccgcaangggaaaatcatccccggctacgagatcagcctcacactcaattggcagggcgaancaaagattcccagggaaactcgcttcttaaagtcg

SEQ ID NO: 4552 - DNA, 289 bp, Glycine max
  unsure (1)..(289): unsure at all n locations; Clone ID: 700559652H1
gtgaganggagtgagagggagcagagggagcgaagagaaganacanagatggagactcctccnccccaacaaggcgtcgtgaagaagaaggagacaaggggccgaaaacccaaaccaaaggacgaacacnggaagggtttgaaggaaggtaggannnnnnnnnnnnnnnnnnnnnnnnnnnnnnnnnnnnnnnnnnnnnnnnnagatcaaccttcggtggacgagaaatacacgcatagaagtcccttgttcctgncntctacgactggntcgccaaccacaacctcgt

SEQ ID NO: 4553 - DNA, 286 bp, Glycine max
  unsure (1)..(286): unsure at all n locations; Clone ID: 700559653H1
agagaaggttgaggctgtgaaaggtctttcactcactgctgatggaaatggcgttgtttttnatgtaccagctaaagatttagacatatatcttaatggtcaggaaaatgcctcgaatgtatgtttagaggtagtgaaaacactgccacagttgcaacagaaagagccacaatcaagaggtggcagatttggtgataatggtggtcgtggtgggaactacaggtttggtggaagaggtggaggaggcaggaatggtaggttctccaatggtggtgggcgtggcggc

SEQ ID NO: 4554 - DNA, 287 bp, Glycine max
  unsure (1)..(287): unsure at all n locations; Clone ID: 700559654H1
atgaaaacgagagaacgagggcaatgaccgaaatgaatggcgtttattgttctagtaggcccatggcgantaggtgttgcaactcccaagaaaacttatggcttccaacaacaatatncnnctcaagctgtggtattggctgggggacactcagctaatggtgctgtggcccaaggttcccattctgaaggggatataaacaacactactatatttgttggagggcttgattctgataccagtgatgaggatctcagacaaccattttngcaatntggtgaggttgt

SEQ ID NO: 4555 - DNA, 184 bp, Glycine max
  unsure (1)..(184): unsure at all n locations; Clone ID: 700559655H1
gacaaatttatcatttagcaaattgtgatgtncttccacaaatgatcttgaagtcatatgtaatcactatcacacacaattggtgtcatctcaatttatgtgtcaccatcctacttgtaagtatatgggctttgtatacttgnaagtaatatggactttgtatagcatacactggattgcctct

SEQ ID NO: 4556 - DNA, 283 bp, Glycine max
  unsure (1)..(283): unsure at all n locations; Clone ID: 700559657H1
ggagtttcaagggttaccggaaggttgcattgctagtatactctctcgcactacgccggcggacgtgtgtaggttttccgtcgtatcaaagattttccgttcggccgctgaatcggacgctgtgtggaaacgttttctcccttccgattaccattccatcatntcccagtctccttcgcctctcaactatccttccaagaaggagctctatctcgctctctcggatcgccctatcatcatcgatcagggtaaaaagagctttcaattggagaaaaagagtggg

SEQ ID NO: 4557 - DNA, 284 bp, Glycine max
  unsure (1)..(284): unsure at all n locations; Clone ID: 700559658H1
tttggttggcaagtgtgttcaaaatttgaccaaactcactctcactccccaaattaaactnnnnnnnnnnnnnnnnnnnnnnnnnnnnnnnnaccttctctttaatttgggttccacaatcaaaaccaatntnagccaccatcaagactttggcatggagccttactccattgatggtgtttctncacaaactaactccaaattctacgatgatgatggccatgttaaacgaacagggaccgtttggacaacaagctcgcacanaataacagcagtggtgggtt

SEQ ID NO: 4558 - DNA, 283 bp, Glycine max
  unsure (1)..(283): unsure at all n locations; Clone ID: 700559659H1
cggagnccagttatgatgttttctccactcttttcactttcttgtccttagtttctcaactaattcttatatgaattttgtnatataaatgttcaaatcacnattagtatgtgtaaggttanagaattatgtttganatatacatataacatatctatacttgtcaaataatggagttgcactgtggagtaaaatcaattaacttttcacgttgaaagtgaagcaactcatcatgggatttctacgttcttttatgtagtttaggtagccaatgtgcatccaa

SEQ ID NO: 4559 - DNA, 284 bp, Glycine max
  unsure (1)..(284): unsure at all n locations; Clone ID: 700559660H1
ccaagatattgctagagagaagaactagttgttcaattagcttcatccatctttctacctccttaannnnnnnnnnnnnnnnnnnnnnnccacccttcttgtgtttgagtacagaagcttgagatcagacatgtcgagctgcagcatcgatgttgcgcctgagcaactctgctacatcccctgcaacttttgcaatattgttcttgcggtgagtgttccatgcagtagcctgtttgacattgtgaccgttcgatgtgggcactgcaccaatctatggtccgtga

SEQ ID NO: 4560 - DNA, 286 bp, Glycine max
  unsure (1)..(286): unsure at all n locations; Clone ID: 700559661H1
agcaaatggcacctactaccaccgtacctattggtaccctcccctccggttccgtcaccggacgcttagcctccgtactacagtgaggtccaaaagacgcgcgtggaccacgcgctccctctcccctccgtcctcaagcatccctncaccatnctcgacggtcctccaagctccgccgccggaaatccagacgagatcgcgaantgtttccgcatttgttcggacaaccttccgcggcattggcgccgagcggtgcggtgcagacgcagaagaagttgaagattgg

SEQ ID NO: 4561 - DNA, 291 bp, Glycine max
  unsure (1)..(291): unsure at all n locations; Clone ID: 700559664H1
caagttgtcaacaaaactgagcacccaatttcccttcaggctgacacattggttgtcttaactcctgatncagaacaaagaagctacttcaaatcttttacctgtaaatnttagtggactttcaaaggctgtgaagaatggtgatactatttttattggtcaatacctgtttactggaagtgaaacaacctcagtgtggctagaggtcagcgaagtgaatggtgatgatgtcacttgtgtcataaaaaattctgctacncttgctgggtcactgtatactttacatgtctc

SEQ ID NO: 4562 - DNA, 291 bp, Glycine max
  unsure (1)..(291): unsure at all n locations; Clone ID: 700559667H1
ggaaganagcacttnagcggaatccaatccttcttcgaggcgancgcatcaaactaaacgtgggcggaaagctgcttcgagacgacgttctccacgctccgtnctggcggcncggactcgctccncttcncgctcncgaaccgncgatccnccgacccgagncccgtcttcatcgaccgcganccggagatcttcnccgncctcctcnncntcctncgcagctnncaccttcnnngccgcnacgcgangtttctgnaaggaacgagctcgnctcccnnccngcggcgtcng

SEQ ID NO: 4563 - DNA, 284 bp, Glycine max
  unsure (1)..(284): unsure at all n locations; Clone ID: 700559668H1
gtctggttactcaaaggaggatctacctgtcattgctgttggtgttgggctcagtacatatgataaagcatctgacaaatactanatacaatcacacatccaactgaatgaatatagggatcgagtgatcttgccaacagctacaaggaaacatggacgatacattggcacctgtgttaaagtgttggatatgtctggtttaaaattttctgcattgaatcaattgaggttgttgactgctatatctacaatagatgactgaactatccggaaaagacagacac

SEQ ID NO: 4564 - DNA, 287 bp, Glycine max
  unsure (1)..(287): unsure at all n locations; Clone ID: 700559669H1
gcagagataagtgatatgcaaaacatgtctcnaatagctgcactctcctccacaacttcacaactcacttcccttcctnccctcccttcttcctcctctccacnttctcgcaaatttcccctcactttccgggaaaaaaacagaactccaatcacacctcacaagcnccctttttcagcaaggcctaccaccaccagagtggtgttggtgaagtctcaggccacagcacctgcttcttctgaggctgtggcagtgacacctgtgtcttctgagatgaaggcatgggt

SEQ ID NO: 4565 - DNA, 273 bp, Glycine max
  unsure (1)..(273): unsure at all n locations; Clone ID: 700559671H1
gcaaanctaanattggtctcagtcacatangtgctttaccaattctttctcccantccntttgcttcaattctntgtgcctactacnaaggctcggggtatagctcggttggattnaggaggatgcaagagttgntgtaaatcccttaatattcattttcgatttccacgaataanatatacnatttgtgcncacttcttgttccatctcgtcacattcatccaacctattntccaattcaagatgacncaacaaccagactttagttggatg

SEQ ID NO: 4566 - DNA, 281 bp, Glycine max
  unsure (1)..(281): unsure at all n locations; Clone ID: 700559672H1
ttcttggattgcggaattcaattttaactgcctcccgagggactgctattctcaacactgtttttgatagctatgggccttgggctggtgaaattagtactcgggatcaaggctcattggttgcttttgaggatggaacaagtacttcttatgcaatctctagttcacaggagaggggacagatgtttattggtcctggagtggatgtttataaaggtcaaattgttggcatccatcagcgacctggggacttgtccttgaatgtntgcaagaagaaagct

SEQ ID NO: 4567 - DNA, 283 bp, Glycine max
  Clone ID: 700559673H1
ctcttactgtttaacagaccgaaccgcttccgctaaaccgtcttccgttgtgttcggcgactcggctgtcctctccgaaccgcccggttcactcctttggttaaaaaccctaagcttgatacgttttattatgttgagcttctcgggtttagtgttggcggcgcgccggttcgggggatttcggcttcactttttcggctcgactccaccgggaacgggggtgttataattgactcagggacttccgtcacgcgcctcacgcgccctggttatgtggcgttaa

SEQ ID NO: 4568 - DNA, 185 bp, Glycine max
  unsure (1)..(185): unsure at all n locations; Clone ID: 700559675H1
cttcnctncncntctcttcgatggtacccctccncgcagatccganccgcacccttcactaaacccatnattattgattatngattganaanaacatttgggtttcannnncattccaagttgtngcattnntcaacatgtcntnagctcactgctgaacccctgnnctntctttctttgccccc

SEQ ID NO: 4569 - DNA, 216 bp, Glycine max
  unsure (1)..(216): unsure at all n locations; Clone ID: 700559676H1
gagtattgagcntggaggcgccatctctcaccaaacccaacgacccaacaaaaccntccaacacttccagcacccttagtctggagggggggccgggcgaangagcccactccgaaaaatgtttgcggtggcgtccatcgccgccggcatacagttcgggtgggctctgcagctgtctctcttaaccccctacgttcagctcttaggagtccccca

SEQ ID NO: 4570 - DNA, 279 bp, Glycine max
  unsure (1)..(279): unsure at all n locations; Clone ID: 700559677H1
tgcattcttggcaaatgttaaagaattgaattcccataaacaaacaaaagaggagacgctgatgacaggtcttcagtgttttcctcaatgtccttaacccatggttcaatatcaagctctgangcaggaacaggatcacaaactggacgaacacgggtggatgggaaagagttttttcgccaagtnaggaaccgtttgtcttatgagcaatttggtgcattcttggcaaatgttaaagaattgaattcccataaacaaacaaaagaggagacgctgcgg

SEQ ID NO: 4571 - DNA, 280 bp, Glycine max
  unsure (1)..(280): unsure at all n locations; Clone ID: 700559678H1
tacaatctttgtctcantagnctgaggcattcacgtatgatttnctancaagtgtcaaacntctgnaacttctgcatttcnatacntcnacntnctngtaattctattncatcttnctngctgtatgctantnaacattgatggtcatcaagtccctcaacacattatganggaagttggagacactnacaagagaantctggcagaggnaagatcgttgctgcatatggcntctggtgcttctnntaatcacgaatgcggtngtggttatcttaaacta

SEQ ID NO: 4572 - DNA, 282 bp, Glycine max
  unsure (1)..(282): unsure at all n locations; Clone ID: 700559679H1
gagactttcataggattgaaggcaattgtntttcatgatttgtcagtgttttcaatttaatggttctctgaaggattaatatttgaggaataggaagtcaagaaggaaaggaataagctccacaggcaggttttaagaacacaagagtttagtcatgtctgggacattattatgggttgtttcctcccctggtttagaggtttcccattccatgggttacttgattctattcggagtgtgaagttcttagattcctcaaaggccatgtctcgagatttgggt

SEQ ID NO: 4573 - DNA, 284 bp, Glycine max
  unsure (1)..(284): unsure at all n locations; Clone ID: 700559681H1
gtgtgttcctgatcaagagccgtgctataataggaatgactatgtgttttttgatgctttccatcccaccgagcaatggaacctactcaatgcattgacatcnnataattctaccactaattcagcctncacttatccaatgganatcaagcaccttgttgatcatgaaannaagatggaattggagctcacaaatgagtccacttcacaactnagtgccactgaataagtgctggntatcatgtagtcgttcatatggagtngaaataatgtgagttgaatat

SEQ ID NO: 4574 - DNA, 284 bp, Glycine max
  unsure (1)..(284): unsure at all n locations; Clone ID: 700559682H1
cttcaaaatatggctctaacacttcgttcttcaacttctnttattaatcagaagganaccaaagtccttaaaacttcngatgatatccctgcgacagtnagtttttcaaaattcaagccattggtccgtctccgggcgaaaaattcaatgcaagangcgcatcacactcgcgagaacagcttcaatgaagcaagtagaagcgagantgggagaaggtgcttgctccatcggttgcacataaccacaatgattcgaagagagtaccngtgtatgtgatgctgcca

SEQ ID NO: 4575 - DNA, 282 bp, Glycine max
  unsure (1)..(282): unsure at all n locations; Clone ID: 700559684H1
ctgcnaaggattctacccgccgctcgatgggaattgcgcttcaaggcgtctcgtagggctaatccgcctcacgagggtcaccaacggcacgtgcctntggggggccgaggccccctactgctggtcggcaaacggacggcgggcgcacgcntcgcttctagcccggattctgacttagaggcgttcagtcataatccaacgcacggtagcttcgcgccactggcntntcaaccaagngcgatgaccaattgtgcgaatcaaggttcctctcgtactaggttg

SEQ ID NO: 4576 - DNA, 282 bp, Glycine max
  unsure (1)..(282): unsure at all n locations; Clone ID: 700559685H1
ccacgggacctcaatcacggcgtggtgaatgctgatgataatagattctcctgangcttgaagtacattgtngtcgtgctgctgatccaacgtttgcagaggtttctgtnntgntcacagttcacacacaaatggaactgaaactacttctaanaacggttttaatgatggtgtcacntncngcaactgcagcagctgantacattcgacctcagcctcgaaaaaccttccatctcccatggcatctaaaccctcctcntaccctcaacaggtacacatttc

SEQ ID NO: 4577 - DNA, 281 bp, Glycine max
  unsure (1)..(281): unsure at all n locations; Clone ID: 700559686H1
caatctcacccatttcaaaaaaaggccgttagtgttactattcgtaaaatggccactcttgtnctttaccaattctttctcaaactcttgctcctaatttcagtctttcagctttcctttgctgctaggagactcaaccagctggttcaggaccagtcacagttactccattaccacaacggtcctcttctatacggcaaaatcgccgtgaacctaanctggnatggtcacttcaaaccatcccaaaaggccatcatcaccgatttcgttacctcactgtc

SEQ ID NO: 4578 - DNA, 280 bp, Glycine max
  unsure (1)..(280): unsure at all n locations; Clone ID: 700559687H1
ccaaaaaatggaggtctgtaaaacccctttacctgaggtaaccngcattancnanncccacnnncattgggngactttcntttgcaggagttagctgaaagtcttngttgggaaaagaagtatgaaaagggtgatatngctatnnggaganaganaataaatgctaaatcctgcaaaagaaagnctcccaatgtttgtggtntagataatgctgatgatgtgtggnaccaaaanatgganggctgnaaaacccctntanctgaggtaaccagcaaaaatg

SEQ ID NO: 4579 - DNA, 279 bp, Glycine max
  unsure (1)..(279): unsure at all n locations; Clone ID: 700559688H1
ctagtttatcgtgaggagaatatgaagttgtttgtnttctttgttnctgcagtagttttggtagcatggccatgccatggcgcaggctaccaaaggttccctctccgaatgaaaactggctatggtgagcgttcttcggaggtaaaatgcgcaagttttaggcttgctgtggaagcacacaacatccgagcnttaaaaccattcctgaagagtgcgttgaaccaacaaaggactacattaatggcgaacaatttagatcagactctaaaacagttaacc

SEQ ID NO: 4580 - DNA, 279 bp, Glycine max
  unsure (1)..(279): unsure at all n locations; Clone ID: 700559689H1
gtgtgtncctgatcaagagccgtgctataanaggaatgactatgtgttnnttgatgcntnccancccaccgagcaatggaaccnacncaangcatngacancttanaatnctaccacnaantcagccnncacttanccaangganatcaagcaccttgttgatcanganattaagatggaattggagcncacaaatgagtccacnncacaacttagngccactgaataagntctggntatcatgtagtcgttcanatggagttgaaataattgtgagtt

SEQ ID NO: 4581 - DNA, 282 bp, Glycine max
  unsure (1)..(282): unsure at all n locations; Clone ID: 700559694H1
ctcttcaccntcgtctntctttcatttcaattctttgtggttcagaaacnctgtacagttaatcaagcccaacctcacctcacctcanctcacaggttttagttgttaantaaatatatagatagaaatccaaggaagaagatgaagncgtttgccgtccaaaacgtcgtcgctccatcccacgatgagattagcgtggtttgccccaagccccgccgcctcggcctctncaacntccccgtgaacganccccctgtnagacccttctacnggcatctcagt

SEQ ID NO: 4582 - DNA, 285 bp, Glycine max
  Clone ID: 700559696H1
gaaccataaccatgtcagacgaggagcaccacttcgagtcaaaggctgatgctggagcatcaaagacatttccccagcaagctggaaccatccgcaaaaacggttacattgtcatcaagaacaggccatgcaaggttgtggaggtttcaacttccaaaactggcaagcatggacacgcaaagtgtcactttgttgcaattgacatcttcactgggaaaaagcttgaggatattgtcccatcttcccataactgtgatgttccccatgttaatcgcattgactacc

SEQ ID NO: 4583 - DNA, 301 bp, Glycine max
  Clone ID: 700559701H1
aaacgatcttgtctctgtctctggttcgcttcgtctccggcgtctcatttacggtccctgcctctgtctctgtctccgttcgttctgattatacgctgaacatatcttcggggggatctgtgttttggaggattaatttgtagcagttagccttgtcactgtagagaatgcctctgcaactttttgatggcagtgattccgaaaatgaggacatttcaaagatcaagatagacgagaagtatgctcgtaggtttgagcacaacaagaagcgggaggacctccagcgttttaggaattaaaa

SEQ ID NO: 4584 - DNA, 293 bp, Glycine max
  unsure (1)..(293): unsure at all n locations; Clone ID: 700559703H1
aatggacttgctaggagggcaattgtgcagtttcctatgccattggtgtgcctgagcccttgtctgtgtttgttgacacttatggcactgggaagatccctgacaaggaaatcctcagcattgtgaaggagagttttgacttcaggcctggcatgatctccatnaaccttgatctcaagaggggtggaaatggcaggttcttgaagactgctgcatatggacactttggcagagatgaccctgacttcacatgggaagtggtgaagccatcaagggggagaagacctgcttaa

SEQ ID NO: 4585 - DNA, 212 bp, Glycine max
  Clone ID: 700559704H1
agctagcaccacattcacctgaggcttccaaagcaatggcttcccttgcagcatccactgatgctgcttcccttggcatgtcagaaatgcttggaaaccccatcaacttcagtggtgccacaaggccagctccatctgcttctagtcctgcctccttcaagactgtggctcttttctccaaaaagaaggctacaccaacacctccaaaaaaa

SEQ ID NO: 4586 - DNA, 297 bp, Glycine max
  Clone ID: 700559705H1
ttaattcctccacttcactccatgcatgcaccatattcttgaacctcacacacatgtacagtagcatggctgcaaccaacgaagcagaagaagcagcaggaggcaaaagggtccaatacccactggactcttcctcctacaagctcctgaacgagatcggcgaaggcgtgagcgccgtcgtctacaaagccctctgcatccccatgaactccgccgccgtcgcaatcaaatccatcgacctcgaccgctcccggcccgacttagacgacgtccgtcgcgaggccaaaccctatccct

SEQ ID NO: 4587 - DNA, 287 bp, Glycine max
  unsure (1)..(287): unsure at all n locations; Clone ID: 700559707H1
ctaacaaccacttatccctttctccttctaacgagtgaggaaaaatggcgcgtaagaagatcagagagtatgactcaaagaggttgttgaaggagcactttaagagactctctggcaaggagttgccgatcaagtctgcacaaattaccgcatcnactgatttcactgagctacaagagaaggaaccctggctttcatcttctaaattggttgttaaacctgacatgttatttggaaagcgtggcaaaagtggtttggttgccttgaatttggatttgcacaagttg

SEQ ID NO: 4588 - DNA, 287 bp, Glycine max
  unsure (1)..(287): unsure at all n locations; Clone ID: 700559708H1
gcgaganatggcgatggcaatggcgcttcgcnggctttcatcttcaattgataagcctctncgccctctgcttcaatgcgggttccctctactacaagtcgtctttgcctgatgaagcngtttacgacaaggagcgacccggagttacatggccgaagcagttgaatgcttcacttgaggtcgttgatcctgagattgctgatattattgagcttgagaaagctaggcaatggaaggggctggaactgataccgtcagagaatttcacttctgtgtcgtgatgcaac

SEQ ID NO: 4589 - DNA, 302 bp, Glycine max
  Clone ID: 700559709H1
gcagaatcagatatttgaaggttagaacgaaaaagaatcatcgatggcagagacgaaagaaggttcaggttcggagatgtctctgaaggatcagggcaacgagtttttcaagtcaggaaagtatctcaaagctgctgcactctacactcaagccatcaagctagacccttctaaccctaccctctatagtaatcgtgctgcagcactactgcaattggataagcttaataaagctctagatgatgcagagatgacaatcaaattaaaaccccaatgggaaaagggatatttaggaagggaag

SEQ ID NO: 4590 - DNA, 278 bp, Glycine max
  unsure (1)..(278): unsure at all n locations; Clone ID: 700559710H1
ggaacagtttgattggaggagangactttaagagtggtcagaccaaaatganatctgngttggtggatttccttgtgggggccggcatcnagccaacatctatngtgagttacaaccatctgggcaacaatgatggcatgaatctctcagcccctcaaaccttccgctctaaggaaatctccaagagcaatgttgttgacgatatggtcaacagcaacgccatcctctatgagcccggtgaacatccagaccatgtggttgtcattagtacgtgcctt

SEQ ID NO: 4591 - DNA, 299 bp, Glycine max
  unsure (1)..(299): unsure at all n locations; Clone ID: 700559711H1
tttgaatttgccttctcccgcccaagtgaagcccttatttttctcttcaaataactccacaaaacttccaggtagcttttctttgaagagaaaagatagtgacacaacagtagaganacgagtttattgctctgccgctgctcaatcaccaccaccagcatggccaggaacagctattcccgagccttctgatttcaagacatgggatgggcaaaaacctatttctgtcttaggatctacgggttcaattggaatcagacactgagtatagtggctgagttcccagaagatttaaagtt

SEQ ID NO: 4592 - DNA, 282 bp, Glycine max
  unsure (1)..(282): unsure at all n locations; Clone ID: 700559712H1
ctctctccatctnccccatcatctcntctacctactnncttctccntttgngcaacttggcctctgctcaataacacagattctatatcctttgtgttgtgttgtgttgctcactctannnnnnnnnnnnnnnnnnnnnnnnnnnngacaacatcccaccatttgtggctgccctctattttagtccctagcctcaatcantcatgccatcaggtgctaagaagaggaaagctgccaagaaaaagaaggaanaggaaactgaaattaacacaacccttcaac

SEQ ID NO: 4593 - DNA, 297 bp, Glycine max
  unsure (1)..(297): unsure at all n locations; Clone ID: 700559713H1
acaaagtctttattggccacttgtttcaatgcccctctttattgcatatgtatcataacataacattaagatatatattcagcttcttgtcttttccgttacctttttcccctgaaatcactgatccacaacaagaggcactcagagagcatttgttgatttggatttggaaggttccactttggttatggaancaacttagctcccttcctctctctttattttccacattgtacaaatgctatttcagggtacttgttggtagtggtggttgacaaagatattgaaagggaattt

SEQ ID NO: 4594 - DNA, 89 bp, Glycine max
  unsure (1)..(89): unsure at all n locations; Clone ID: 700559714H1
ctcttttagnntttacactctgctttcgggccgctcatacatagcagctccctttcacttccacacaacatacgaccntaanananngt

SEQ ID NO: 4595 - DNA, 298 bp, Glycine max
  unsure (1)..(298): unsure at all n locations; Clone ID: 700559715H1
gagtgaaaccccaatcccaatacactcccaactcacaaagccatgtctccaggtcctgttgtcgacgcttcccctgaggttgaagcagagcaacaacttccctccgtcgatgacgcaacccagttgaagaaatcccaaccgcaggaggatgatgctcccgttgtcgaggacgtgagggnnnnnnnnnnnnnnnnnnnnnnnnnnnnnnnnnnnnnnnnnnnnnnnnnnnacaaggaagacgatgctctaggtggtgctgagggttcaaagcagagcagaagtgagaaaagagtcgaaa

SEQ ID NO: 4596 - DNA, 298 bp, Glycine max
  unsure (1)..(298): unsure at all n locations; Clone ID: 700559716H1
gcagtttctatagtgagggatcaactgcgaaaacacggaaacattcagcaagcatgtgaagcacttgcagaagccgctttggatcgacgtacacaggataatgtcagcattataattgctgatttagggaggacagactggaagaatgcgcctctggagcgacaaaatactatacttgagctggtccaagctcttgcaaccattggaattgtgtccattggaatctggttttcatcacagctttctttatagattaanaaaataccagtcatgtacataaaacagattatcattctga

SEQ ID NO: 4597 - DNA, 296 bp, Glycine max
  unsure (1)..(296): unsure at all n locations; Clone ID: 700559717H1
ggaacgttccagaccacatacagaggtttctctagtgatcttcgttcttctgtggagatcttgttttttcatctcacttttcttctaattaaggaacaagctttccgcagttgaaaaccctagctagctagcttccaccaatttgaatcaccaatggctcgctctttctctaacgtcaaggttctctctgctcttgtggccgacggattctccaacactctcaccaggcgtgggtacgcagcagcgacacaaagcgcgacaagaggaggagtgcctccatcanagcagatagtccc

SEQ ID NO: 4598 - DNA, 296 bp, Glycine max
  unsure (1)..(296): unsure at all n locations; Clone ID: 700559718H1
tnaaatttgacggtgatcacaactcgtctcggccacaattcttttatgattcagtttctattttcttctacaatgtccttcaccctcctaatgttcctagagctcataagcttgagaaatattntaatttgggggatctaaagcttggttctggtgtggacgagagcctattatatgagattctctctagtctgaggtctgcatcaaccgacgctgcaagttcatcttctgtgcttccagcaatttccagcacaaaatcagttagcgaacttctttcagaagttgacnagtgactg

SEQ ID NO: 4599 - DNA, 240 bp, Glycine max
  unsure (1)..(240): unsure at all n locations; Clone ID: 700559719H1
tcacaatcacnntggcgcgagtggatctggatggtaaccccatcaagccacttacgatctgcatgatcggcgctggcgggttcatcgggtcgcacctctgcgagaagctcatgtccganacccctncacaccgtcctcgccctcgacgtctacagcgacaagatcnaacacctcctggatcccgccgattcncccctcccttgggctggccgcatcacttccaccgctcacatcaaacac

SEQ ID NO: 4600 - DNA, 293 bp, Glycine max
  unsure (1)..(293): unsure at all n locations; Clone ID: 700559720H1
aggaattccaagtcccctgtatctttagctccccccagcagggaagttaatgaggatatatctcctattagtgcttcaagttcttgttctatganatttgatgaatcagaagtcaatagtattggtggacaaaagagcgagaaaccttgtctgaattctccaggggagattccttctggggatagtgggaccaatggatcagtgacaaacaaccaacaagtgaaccccgtacttgcagctgctgatacatctaattctaaagaagaagaaaagctagccattgaaagattatg

SEQ ID NO: 4601 - DNA, 292 bp, Glycine max
  Clone ID: 700559721H1
cccagggttaatgacatggtcatcatccctcatgtcctcggtccaatggccagggttaatgacatggtcatacacaattgagagatgatgcccttgaacccgctgatctcaatgacaggaacatgattgtggtggatgttggtggcggcacgggtttcaccactcttggtattgtcaagcacgtggatgccaagaatgtcaccattcttgaccagtcaccccaccagctcgccaaggccaagcagaaggagccactcaaggaatgcaaaataatcgaaggggtgccgaggat

SEQ ID NO: 4602 - DNA, 291 bp, Glycine max
  unsure (1)..(291): unsure at all n locations; Clone ID: 700559722H1
gccatattccacaaganctctccaanngntcctccttcccacgagattctttggtgggaaaaatccaagaggtttgaaatttgaaggcagggaagatggattatttcaatgcaccaggaaganaccatctctntgttccagggccggttaacattccggaccagatcatccgggccatgaacagaaacaatgaggactnccgttctccagcaattccngctatgacanaaatttgcttgaggatgtcaagaagattttcaagaccatactggaaccccattctcatcccta

SEQ ID NO: 4603 - DNA, 287 bp, Glycine max
  unsure (1)..(287): unsure at all n locations; Clone ID: 700559723H1
gaaagatgagtccaacatgngtttttgtgttaggtgttgcagcaatgttggtggttgtgagtggacaatcatcagtgaagcctttggtgaagacagtgaaggggaagaaggtgtgtgacaaagggtgggagtgcaaaggttggtctgcatattgctgcaatgagactatctccgactacttccagacataccagtttgagaacctcttcgcgaanccaattcgccggtggcacatgctgttggtttctgggactaccgttctttcatcaccgctgctcatgtaccag

SEQ ID NO: 4604 - DNA, 237 bp, Glycine max
  Clone ID: 700559724H1
tcacaatcacaatggcgcgagtggatctggatggtaaccccatcaagccacttacgatctgcatgatcggcgctggcgggttcatcgggtcgcacctctgcgagaagctcatgtccgaaacccctcacaccgtcctcgccctcgacgtctacagcgacaagatcaaacacctcctggatcccgccgattcccccctcccttgggctggccgcatcaccttccaccgctcaacatcaa

SEQ ID NO: 4605 - DNA, 299 bp, Glycine max
  unsure (1)..(299): unsure at all n locations; Clone ID: 700559725H1
cccataccgaacactcttcttcaatcacgcgaaggtggtctcgattgcnagtgatccacgatacactctacgcttcacaaaaccttcaaacccaattccacagaattcttctgcntcaccatgccaccaaagcctttagactatgggtcaataaatgaaaacgtgaagaagagtcaatatgctgtcagaggtgaattataccttcgagcttctgaacttcagaaagagggcaaaaagattatctttactaatgttggcaacccgcatgcattgggacagaaaccactggcttccctcgc

SEQ ID NO: 4606 - DNA, 296 bp, Glycine max
  Clone ID: 700559727H1
tgttgatcgagataactagaaacagtgtgatgaaaatgaaggtccttgttttcttcgttgctacaattttggtagcatggcaatgccatgcgtacgatatgttccctctccgaatgaacactggctatggtgcccgtactccggaggtgaaatgcgcaagttggaggcttgctgtggaagcacacaacatctttggctttgagaccattcctgaagagtgcgttgaagcaacaaaggaatacatccatggcgaacaatatagatcagactccaaaacagttaaccacaagcttact

SEQ ID NO: 4607 - DNA, 295 bp, Glycine max
  Clone ID: 700559728H1
gtggcatcatctagatgcagaccctgattttggttcttgccaagccaaagaattgttggatcacttggaaagtgtgcttgctaatgaaccagcagctgttacgagaggccagcatattgttgaagttaagccacagggaataagcaagggtttggtagctgaacaggttcttatgaccatggttaatggtgccaatccaccagattttgtgctgtgcattggagatgataggtccgacgaggacatgtttgagagcattttgaggacggttacgtgcccgtcataccatcagctc

SEQ ID NO: 4608 - DNA, 293 bp, Glycine max
  unsure (1)..(293): unsure at all n locations; Clone ID: 700559729H1
gntctgaagccacataaccctaaccatcaaacggctaggtgtcgctgggacttcaatggcagtgactgaagctcagaatcctcttcttggagaaaacacatgtggttccttgttaaaaaagcttcaggaaatatgggatgaggttggtgagagcgacgagcatgcgagacaagatgcttcttcagttagagcaggagtgcttggatgtgtacaanagaaaggttgagcaggctgccaagtcaagggcgcantacttcaagctctgtctgatgctaagcttgagcttccatctt

SEQ ID NO: 4609 - DNA, 262 bp, Glycine max
  Clone ID: 700559730H1
attttcacaattccaatctgccaaatatagaaaaccaatacgccaccacattagtaaaattgcatgcagtgaaaacacactcgaaggagaaaagctcccacatcggaggaacgttctacttggcctaggaggattttgcggcgctgctgttatgtctctgaacaacaagaacataccttttgcctctgctgctcccacacccatgttccctctggtgttggattccgctgtgagcacggtggtgaagaggcaagcaagtcga

SEQ ID NO: 4610 - DNA, 294 bp, Glycine max
  Clone ID: 700559731H1
ctagtttcttacaaggctctactctatgcttcaccttctgctctagaaaattcagtggtgatacatggcttcggctactctctctgtagccaaaccagcccttcaggcaaatgggaaaggcttctctgaattctctggcctccgcagctcatcaggcttccttcccttttctagaaaatcttcagaggatttccattctgtcattgccttccagacctatgcagttggaagcagtggaggatacaagaagggtgtgacagaagcaaaactgaaggttgccataacggatttgga

SEQ ID NO: 4611 - DNA, 299 bp, Glycine max
  unsure (1)..(299): unsure at all n locations; Clone ID: 700559732H1
gcaattgaagttaaaagccttagccttccctacaactccaaacanncaagacatcatcatccatggctgcctccgtctccactgtncggagctgtcaacagagctcttttgaacctgaatggttctggagctggagcttcagctcccagttcagccttctttgggaccagcttgaagaaggttattgcctcaagggtccccaacagcaaggtttccggtggaagcttcaagattgttgctgtagaagagaagaaagagattgaagagacccagcagaccgacaaggacgatggaagggt

SEQ ID NO: 4612 - DNA, 289 bp, Glycine max
  Clone ID: 700559733H1
ctcactggaagccttgctgtgagtaagggaaaggcttcctgcactgagcaccaagttgaaacctcttgattctttgcttagaattccacagaatatggagacaggttcttttcaatgactccccacctttggagttcaagggtatgagcaaggaggaggaagactcattgctagggcaagttgaaatatggaggtacatgacatgcttcacggactccgtggccttgaaatccgtcatagagctgcgcatagccgacataatagaccgttatgggaaccactatccttg

SEQ ID NO: 4613 - DNA, 293 bp, Glycine max
  Clone ID: 700559734H1
ccggggttatggactagaaatttacatcgtccttcttcaccagggttatgggcgccaccaacagtggctgggataaattccagaggcattaatgattttagtttgggattgacatctcgaaaaggcggcttagaacttgtgagtggaagtaaatctgctatcgtgactaatacgattgtagaaattgtggttcctgatgatactattgactgtgtatacggggaaaatggtagcaatttggctcgtctaagacagatatcgggtgccaatgttgttgtccatagcctcgtccc

SEQ ID NO: 4614 - DNA, 290 bp, Glycine max
  unsure (1)..(290): unsure at all n locations; Clone ID: 700559736H1
gcaaganactgtagaggatgtccctgtggtaatacagtggctatggttggtcttgaccagttcatcacaaagaatgcaacattgacaaatgaganggaagtcgatgcccaccctatccgagctatgaagttttctgtctcacctgttgttcgtgttgctgttcantgtaaggttgcntcagatcttcccaagcttgttgaaggtcttaagcggttggctaagtcagatcctatggttgtttgtaccattgaggagtctggtgaacacattgttgctggtcaggagagctt

SEQ ID NO: 4615 - DNA, 288 bp, Glycine max
  unsure (1)..(288): unsure at all n locations; Clone ID: 700559737H1
ttgaacaccgaggnacttgaggcaangttgttccctcaccagaaactgcttcgtgacangacagtggttaaggataagggctctgtngtggatgaagagaaggtgctgagtccggttgacgataatttggttgcggtcgagtttttggctctgattgataaagagaaaganaaggtgaatgctggggaggatgtgaaggaaangggtggaggtgggaatgttaagangaacaatggcattgatgtgctgctcggggcggatgagaagctcgaggatttcatgatgatc

SEQ ID NO: 4616 - DNA, 298 bp, Glycine max
  unsure (1)..(298): unsure at all n locations; Clone ID: 700559738H1
ggtaaccaaagttccaaaccctaaacgcangattttaattttctggttttctctttttcaatcggtgcttcctccggcggcgcgtgggagtgtctttggcgcgtgattcctagttccccgcttacctatgcttcgctcgacccgcattgtagagttcacgccggagagacggcggaatctcaccggacgatcgtgatttcgcatcttcatggcttccgcctaccggaacgaacctaattggccacggcatagaagcggtggagctggattcatgggaaaagtaccttctctaacccta

SEQ ID NO: 4617 - DNA, 299 bp, Glycine max
  Clone ID: 700559739H1
gaaaatgaaggtccttgttttcttcgttgctacaattttggtagcatggcaatgccatgcgtaacgatatgttccctctccgaatgaacactggctatggtgcccgtactccggaggtgaaatgcgcaagttggaggcttgctgtggaagcacacaacatctttggctttgagaccattcctgaagagtgcgttgaagcaacaaaggaatacatccatggcgaacaatatagatcagactccaaaacagttaaccaacaagcttacttttatgccagagacctcgaagccatcccaagg

SEQ ID NO: 4618 - DNA, 298 bp, Glycine max
  unsure (1)..(298): unsure at all n locations; Clone ID: 700559740H1
ctgagatgtggctgtttccccttttgttttctcaagagttttctatgagcacaatctccaagctgttcaggaaccggttttggattggttttctgtgtcaaattcccataggaatgtctctggtgaggaagagtctgacttcaagagtggagaatgttgaggaaagccttgacatgtcagtgttggacttgcctgagttggccttggattgcattcttgagaggcttccnccctcttcgctgtgtcgaatcgccgccgtgtgccgcaccttgagggagaggtgtgtggtgatcacctt

SEQ ID NO: 4619 - DNA, 299 bp, Glycine max
  unsure (1)..(299): unsure at all n locations; Clone ID: 700559741H1
agcactcaaaaaacaacaactcatctcatcattattccctttctcactcagcacatnctnnnnagnnngcaccatcaccaataataatggcatcatcctcatcaaccgttgctttgagaaccatctcctctttctctctgaaacctgccaccacaacaagatcattactcaacactagtacttcatccaccataaccctcttaccctttacatcagcaaactcatttctctccaaaaccctcaaactcaacacctcttccccacactctcacctttcactacccctcacaagtctttca

SEQ ID NO: 4620 - DNA, 295 bp, Glycine max
  unsure (1)..(295): unsure at all n locations; Clone ID: 700559742H1
gaacaaacgtcccaagtatcgtttttccntatttgattacagcctcaactcaaccgtgtctgaagtncacttcaatggcggataggganccaaagcctaaagnctcgccttcagtttggtatcacactaccacaaaaatgatcttgaacgacgctgattcaaagatggttcttccaaaaccaatgtcatccaaaacgcatgtcatttttgtaaatcattgcaagtgttcantagcgattttcaaaaaaccgtctttgaacgcaagtgttcaacaacggtttagntttaganccgt

SEQ ID NO: 4621 - DNA, 297 bp, Glycine max
  unsure (1)..(297): unsure at all n locations; Clone ID: 700559744H1
gtgtagtggaagantcactcccttatccatttccacnccacancatcagngnanaaccaacgctctctcttcagcctccattctacgctctcccaacngccagtctctgacccgaagagcgaaccataatggaagagtaaattaccggaaaccgaataaccgtttctccgtgaaagcctccgccaaagagattgcctttgaccagcattcccgctctgctatgcaggccggcattgacaagctcgccgacgctgttgggctcactcttgggcccagagggaggaatgtgtgctggat

SEQ ID NO: 4622 - DNA, 291 bp, Glycine max
  unsure (1)..(291): unsure at all n locations; Clone ID: 700559746H1
cttggtgttatggttttgtcacagctttctacgatatgttggagaaccctgcaatattgggtctgtgcacagncattggaatgctttttagtcccctgtgggtaacatttttctttggtgtcatcgttggatggttgtggaaaccgaaatgggcgaggttgggggaaaaaaaattggcgactaccctcgccaaatccttagattttgcctcaccctcctcggcttcttcgccttctaagtttccagtgtctcctatgaagagttgttcttcctctccttgctganttccat

SEQ ID NO: 4623 - DNA, 293 bp, Glycine max
  unsure (1)..(293): unsure at all n locations; Clone ID: 700559747H1
ctaaccctatcttctctcttgtctngattccattcaatttaaacctcagggcgtggcaagtttcaacctttttcgagcacccattaacattaacatggccattccctacccccatttcatcgccaccgagaaagccgccatggacgccggcctcctccacccctcctccccctcctccgtcatcctcacccaagacgacctcaagaaaatcgccgcctacaaggccgtcgagtacgtcgagtccggcatggtcctcggcctcggcaccggctccactgccaanacgccgtcga

SEQ ID NO: 4624 - DNA, 291 bp, Glycine max
  unsure (1)..(291): unsure at all n locations; Clone ID: 700559749H1
anttgcttccgaagaatcccngngcaagcnccccagcgagcagtccactaccgaactcatcacgagcgcgaantggttgcngacgcggcgcagtcggctctgnagagcgncagcggcaangtggacaaggccaaggtggctgacgctgccggcgatcttctcgacgcngcggggaatntggaanncttgntgncaaacaangcatanggcatatgtngacaaggctgctgattatctgcntaattaccagggtgataatacnatgctccttcacagcctgagagtctaaag

SEQ ID NO: 4625 - DNA, 288 bp, Glycine max
  unsure (1)..(288): unsure at all n locations; Clone ID: 700559750H1
anaaaattgaacttacccctcctacaaggcaaaagaatatatgggtgaaatacaggaatgtttatgggttttntccttgtggattgangtttttttctagtgcttagatgtctccttcaggtgacacaatgccattagattttaagtntttattaaccaaaatgaagttcttccntttgtnttaattaatttganattttgtnattgtcaatacaagtgtccaaagaaagtgcttgttatgtgtatnatttnngaatgtactatttattcctgttnaaggtntggaag

SEQ ID NO: 4626 - DNA, 289 bp, Glycine max
  unsure (1)..(289): unsure at all n locations; Clone ID: 700559751H1
gcgaaccataatggaagagtanattaccggaaaccgaataaccgtttctccgtgaaagcctccgccaaagagattgcctttgaccagcattcccgctctgctatgcaggccggcattgacaagctcgccgacgctgtngggctcactcttgggcccanagggaggaatgttgtgttggatgagtttggaagtcctaaagtggtcaacgatggtgtcaccattgctcgcgcaatcgagcttcccgatcctatggagantgctggtgcagctcttatcaggangttgctag

SEQ ID NO: 4627 - DNA, 280 bp, Glycine max
  unsure (1)..(280): unsure at all n locations; Clone ID: 700559753H1
aatccctattttnttcctcagtagtgtcatttacgcttctcttctctgcancaactatgcctaaccctaaggtcttcttcgacatgaccatcggcggtcaatctgctggccgcatcgtgatggagctctacgccgacgtcactccccgcaccgccgatannttctgcgngcnttgcannggcgacaatngcgtagngcggancgnnantcccctccactanaagggctcgtncttcnaccgcgtgatcccgagtttcatgtgtcagggtgcgacttcacc

SEQ ID NO: 4628 - DNA, 296 bp, Glycine max
  unsure (1)..(296): unsure at all n locations; Clone ID: 700559754H1
aagaaactcaactctactctgcaactcattccnaggatttctacacctcgacgaatcctaggtacttcagaaattttgaatgaatggagatgacaatgtcagcagcaacttgttccaacatgactagattcagtggcattctccggacaacatgtgtatcatcatctcccaagaggaagcatgcaaaaggaatcttgagaaattttaccatatgtgcctcaccatttatatcttcagttgaccctataattgttaattccccttcctttcaagttttggcttccaanttcgcttgc

SEQ ID NO: 4629 - DNA, 199 bp, Glycine max
  Clone ID: 700559755H1
gtgcgtttcgctcgtgccggatcagacgcccaacatggatgaggtggtgcacatgatccaggatattagccgaagcgagaccaccgatgacggcttacgccaatcgtccgatgatccttctaaaggatcggacggtcacacacccccgcaggacgctaggactacccctaggtcggacacgtcgtagtagtgaagctgt

SEQ ID NO: 4630 - DNA, 276 bp, Glycine max
  unsure (1)..(276): unsure at all n locations; Clone ID: 700559756H1
ccggncacaaagcggagtggcccccgtggagcgatggctcgacgaggacggcgacgatgtcggtaacgacgacggtgacggagaggtcgaggttgttatggtagatagttagacaatttttacaacagtaacggcaacggaagtcgctttggacggaaaatgaatctatttttggcgaagagaaattacttgtcgtgatttattcgccgtctcaaaaaggtagagagaatatggcttcctttcgttttttccttgtatagtttgaaaattctcccg

SEQ ID NO: 4631 - DNA, 294 bp, Glycine max
  Clone ID: 700559757H1
caagaatactctaatgaggttgaagttcgtgctagtgtggagccctcagaagatgaacttgctgatctgtcaagagcttgtgcacaaactctgggatctagatttaaatcttttggtaccttgcaaagactatgaaattgactgtggtgaagggaaaaaggaataccaaaaggaagatatggcacaggggagcttgtttacttgggttagtgatgatgtattcaaaaagcctacatttgctcgttttctttcacttttggataactacaatccacatcaaggagtaaggaagta

SEQ ID NO: 4632 - DNA, 290 bp, Glycine max
  Clone ID: 700559759H1
aaaacttagctactaaggaaggatcaaagagaatggctcaagcaatggcatcaatggctggcttgcgtggttcctctcaggctgtgttggaaggtagccttcaggtgagtggctccacacgcttgaatgtggggagtggaagcagggtggcctcagtcacacgtgcagggttcacagttagagcacaacaacaacaagtgagtggtgaggtacaaagcagccgtaggcagtgctttcacttgttgctgctggtttggccactggctcttttgttcaagcttgcttgctga

SEQ ID NO: 4633 - DNA, 292 bp, Glycine max
  unsure (1)..(292): unsure at all n locations; Clone ID: 700559760H1
aatgtctctcaccattccctccaacctctccaagcccgccgccctccgccccaaactaagcccaaagctaaggtccgccgccacaaccaccatcgtctgnnnnnnnnnnnnnnnnnnnnnnnnnnnnnnngtgtcctccgacctgaaggcgttctccgccgcgctggccctctcctccatcctcctctccgcccctctccccgccggcgccgacatctcggggctcaccccatgcaaggagtcgaagcagttcgcgaagtggagaagcagtcgataaagaatggagtcgtcg

SEQ ID NO: 4634 - DNA, 290 bp, Glycine max
  unsure (1)..(290): unsure at all n locations; Clone ID: 700559761H1
antgtcccaacgtcaaatatgtaagggaggggtatttcatcactgttgatattgagaaaggcatgcaagatgggcaggaggtgctattttatgaggacggtgaacccataattgatggagaatctggagatttaaggtttcgtatccgtactgcacctcatgacgtcttcagaagagaaggcaatgacttgcacactactgtcnctanaactctggttcaagcccttgttggttttgagaagaccattaaacacctagatgagcatctggtggacataacacaaaggaat

SEQ ID NO: 4635 - DNA, 280 bp, Glycine max
  unsure (1)..(280): unsure at all n locations; Clone ID: 700559762H1
gaaagatggaattgactatgcggccgtcacagtccagctaccgggaggcgaacgtgttccgttcctcttcaccatcaagcagttggtggcatcagggaagccagacagctttagtggagagtttctggtcccatcataccgtggaagctctttcttggaccccaagggaagaggtgcctctacaggttatgacaatgcagttgctttgcctgctggtggaagaggagatgaggaggaattgccaaggaaaacaacaagagtgcctcatcancaaggggaa

SEQ ID NO: 4636 - DNA, 289 bp, Glycine max
  Clone ID: 700559763H1
ccattattgaaaaaggttatggtgttggtgatgttatctctcttttgtggtttaaacgaagccttccccgttactgtactcaatttattgagatatgcatcatgctatgtgccgaccatggtccttgtgtctctggtgctcacaatactattgtgacagcaagggctgggaaggacctagtttctagtcttgtatcaggtttgcttacaattggtcctcgatttgggggtgccattgatgatgctgctcgctacttcaaggatgctcatgacagggcgttagtccttat

SEQ ID NO: 4637 - DNA, 291 bp, Glycine max
  unsure (1)..(291): unsure at all n locations; Clone ID: 700559764H1
gccaccaattgtttcctcttgtggaagtggtagatttgtcacagcacctgttattactgaagatggtcagccaattcaagatccattggtgttgaaagaaacaagtcaggccaagggattggctgtacatcctcaatataataatagtccttcaagtatggatgctgcaaataatttagcaaaggtgacagacaagacagtagtccagtggatgttaactctccatcaaataggtcttgatgtggttcgcaccgataggacattagttttttatgagaanaagaaaacttg

SEQ ID NO: 4638 - DNA, 294 bp, Glycine max
  Clone ID: 700559765H1
gaaaaactcacccactccaagttactcactcaaccacaaccaccatgttctgatattcccccaaccacacttttcacacaccaatcaaactaatgcaaatgcaaagcatgtcaaccaccatggcttcgttttctcctccgacccatttctcagccactccttcttcctcgaaaccccgtcttgtctacaagaacaactttttcttctctctcaggtcgaggagtctttctctctctcccttgaaggctgctgcttctgagaacggcgtcgggaccgccgtggacctccgccgga

SEQ ID NO: 4639 - DNA, 289 bp, Glycine max
  unsure (1)..(289): unsure at all n locations; Clone ID: 700559766H1
gtggctttgcagggaagaaagtgtcagtagaaaatanatgtcctcttcccagggacactctctatttcacagatctatntctaagtgtcggtgatcccctttctccttccttctctgagagacaatgncaatgacgtgggcgcgattcgattcgtggaagcagcaatactacaccacaagcggcgtggtggtaggttacgcagtatgctccagcctcctggccatcatcancnaatacgccatcaccaaattcaactacccaggcctcttaaccgcgctcagtacctca

SEQ ID NO: 4640 - DNA, 287 bp, Glycine max
  unsure (1)..(287): unsure at all n locations; Clone ID: 700559767H1
caactagaagaagtaatgnagcatgtggcatcaactganagtttgaaatctagcatcgatcacttgaataaggagttggaaaggatgaaaaatgagaatatgcttccttcagtagatggtcaaagccacgagtcaagttttccaggtctgcaaagagaactgatgcaattncacgaggccaatcnagagttaggaaacatattccctgtttttgataaattctctatcagcggtaatgcattagaaagggtgctcgctttggagattgagcttgctgagcattgcgg

SEQ ID NO: 4641 - DNA, 286 bp, Glycine max
  Clone ID: 700559768H1
ccaccgtcgccagcatcatgcgcacacctgagccttttgtgatggtttcactggaaggatcaacaaccacatgttttggtgggactgaggagccagctgcctatggtgaactggtgtccatgggtgctcttaacccagaattgaacaaaaaactgagtgctggaattgcctgcgttcttgaaaccaagttgttggtgccaaagtcacggttcttcttaaaattctataacacagagggctataattgtgcattgaacgggtctatcatggtagtcggtccaaatga

SEQ ID NO: 4642 - DNA, 286 bp, Glycine max
  unsure (1)..(286): unsure at all n locations; Clone ID: 700559769H1
atttgcaaatagcaaagantcaaaagcacataatccttatcgctgggttagatatgtaacccaagcaaactcatacgtagcacggttataattggaatctctgcaagtccaaattccgagttaaatttggggggatggcagcatatcaggtgaaaaaatggcgggctctctgcctctacaagtgaagataattttctctagataatgaatggctaaatggaactagagttcttaaaatttttcattttaaatgaaaatgaagatgtacacgacaaacttaaaattg

SEQ ID NO: 4643 - DNA, 294 bp, Glycine max
  unsure (1)..(294): unsure at all n locations; Clone ID: 700559770H1
ctcataacacaaagcacaaagcaagctcatccttgagttaaaanatggcagcagcttcttccatggctctctcatccccatccttggctggcaaggccgtgaagctgggcccatcagccccagaagtgggaagggtgagcatgaggaagaccgtcaccaagcaggtctcctcaggaagcccatggtacggcccagaccgagtcaagtacttgggcccattctctggcgagcccccgtcctacctaaccggtgagttcccaggcgactacggctgggacactgctggctttccgc

SEQ ID NO: 4644 - DNA, 294 bp, Glycine max
  Clone ID: 700559771H1
caacaacgctgaacgcagaaaggggaaaaaggggattagggtttaggaagcagcgacaacaatggatttcacagcggagaagaaggaatcagagagcaacaccgaaaatgctcatccaacaactttagattcttcttctcaattggcatcggcacttgattccagcaacaaagaaatcgaagaacgacaagctcgtgaactcaaagccggtcttcaccccctcaagcacaagtttgtcttctggtacacgcgccgaacacctggagttcgaaatcaaacatcatcgaggacaac

SEQ ID NO: 4645 - DNA, 296 bp, Glycine max
  unsure (1)..(296): unsure at all n locations; Clone ID: 700559772H1
cttcagtggtggaagctactagaacactncgtttgttcncgcactgcgatgaggaagtggacggttgcttccgctctgccttcttctctcctctcctctttctctttgcagatcaaggtcgaaagtttcaggcgaatgccgagggagattccgacgagcttgtagatcctccgaagtggaggacaanatcngtgctgtgcctcatggcctttccaccgattcagatgtctctcaagacggagtcgtagtcgatctcgaagagntctctccggagcaatgcnganaattgagttcca

SEQ ID NO: 4646 - DNA, 280 bp, Glycine max
  unsure (1)..(280): unsure at all n locations; Clone ID: 700559773H1
gatgtgtacaagattggaggtattggnactgtgccagtgggacgtgttgagaccggtgtcttgaagcctggaatggtggtgacttttgcaccaactggactgacaactgaagtcaagtctgtggagatgcaccatgaatctcttacagaggcacatcctggtgacaatgtgggattcaatgttaagaatgttgctgttaaggatttgaagcgtggttatgttgcctcaaactcaaaggatgaccctgcaaaggaggctgctaattcacanccaagtcatc

SEQ ID NO: 4647 - DNA, 280 bp, Glycine max
  unsure (1)..(280): unsure at all n locations; Clone ID: 700559776H1
tgcaaatcaaacttacagagtcagctttgactgatancagacacaatttgggctaagtagattttccaagcaaaatgaagcancttgcttntattatgtaacttaccttatttgtgctttgcagtggtgttgatgtatatactgctattgctggggctgttggagctctatatggacctcttcatggtggagccaatgaggctgtcctcaanatgttgagtgaaattggaactgttgagaacnttccagcattcattgagggtgttaaaccaggaaacgg

SEQ ID NO: 4648 - DNA, 152 bp, Glycine max
  unsure (1)..(152): unsure at all n locations; Clone ID: 700559777H1
cccttctntctctttctctctgatgggttttggaagcangtacgaggaacatcttatactcaaaggttcacactcacacccctagcacccatagcttatgggcatgccaaagttaagctctttctcccaacaagtgcttccacacaacatag

SEQ ID NO: 4649 - DNA, 289 bp, Glycine max
  unsure (1)..(289): unsure at all n locations; Clone ID: 700559778H1
catagggctatatagcatanacatttgagtcttcattgcacaatgtcaacctcttccataaacgggtggtgcctctcttccatctccccagccaaaacctctctcaggaaggccacattacgcccttccgtcttcgcaacccttaacactccttcttctccttcctcttcatcttccttcccctctctcattcaagacaggcctgtttttgctgcccctgcccccatcatcaccccaactgtgagagaggatatggcaaaggaatacgagaaagctattaagaattcag

SEQ ID NO: 4650 - DNA, 287 bp, Glycine max
  Clone ID: 700559779H1
accaaaccctcttgaccttgtgatatctctctcttttaatttctaggatcaaaccaaaaaatggtcttagaagagagtgtagtgcatgatgtgaggctatcctcagttgggccgggccgggccaccgggtcggacgtattccacaacccgggtggcttggacttggccatgaagcttcactaccttagagtggtgtacttctttgatagtgaggctgcacaagacctaaccatcatgaaaattaaggatggcatgttcactttgttcaaccattactcatcacctgt

SEQ ID NO: 4651 - DNA, 291 bp, Glycine max
  Clone ID: 700559780H1
gtggagcaagagcaaaaggtgactgaggatgctcgtaggtttgctgagcaagatgcagccgcacaaagatatgctgcgcaagtcccttcaggaaaagtatgaagaagcaactgctgcacttgctgaaatggagaagagggcagttatggcagaatctatgctggaggctacattgcagtaccaatctggccaagttaaagtgctacaatctccacgatcttcacagtcagattctccggtatcgagaaacaatcaagagccggatatccctgctaggaggtaagtttgctt

SEQ ID NO: 4652 - DNA, 289 bp, Glycine max
  unsure (1)..(289): unsure at all n locations; Clone ID: 700559782H1
ctgggacaattgccggtaattcagttacccaaaaggcttttgggatgaacgaagtgcgttcaganttctaaagttccaagctttcagtccttgaaggttaaggctacagaagatnanactacacaaagcaaaacaattaggagcattgtttgttctgattgtgatggaaatggtgcaaaatcatgtactcaatgcaaaggtactggagttaattctgtagatcacttcaatggacaatttaaagctggtggattgtgttggctatgcaggggaaaanaggatattttgt

SEQ ID NO: 4653 - DNA, 285 bp, Glycine max
  unsure (1)..(285): unsure at all n locations; Clone ID: 700559783H1
gcaacctatggtgatcaactagtaccatancaaaacaacagttggagattaacttgggtggggtcacagtagaagaggcaattagtgctcacagattattcntattagattaccatgatgcattcttcccgtatttgacgaagataaacagcctacctattgcnaaagcttatgccacaaggacaatcctgttcttgaaagacgatggatctttaaagccacttgctatcgaattaagcaagcctgcaacagtgagtaaagtggtgttgcctgcacagaaggtgt

SEQ ID NO: 4654 - DNA, 284 bp, Glycine max
  Clone ID: 700559784H1
ccagatgcgggtaccatcggtgcacatggagagcagactgtcaaaattcctgtcactttgatttatgatgacatcaagcaaacatatgctgatattaaacctggaagcatcattccttatagggtgaaggttagtctcatttttgatgttcccatcttgggaaggctaactctacctttggagaaaactggagaaatccccataccatacaagcctgatattgatcttgagaagattcattttgaaaggttctcttttgaagagacaattgcaagttcatttga

SEQ ID NO: 4655 - DNA, 286 bp, Glycine max
  unsure (1)..(286): unsure at all n locations; Clone ID: 700559785H1
gttccagaggaacgcagagctggacccagaaaagaggctgtacccaggtggcagttacttcgacccactgggcctggcctcagatccagagaagaaagccacccttcaattggcggagatcaagcacgcccgtntcgccatggtgggcttcttgggctttgcagtccaagctgccgccactggcaagggcccgctcaacaactgggccacccacttgagtgacccatccacacaaccatcattgnncacttctcatcctcctcttaagaagaagcaaagangaaga

SEQ ID NO: 4656 - DNA, 292 bp, Glycine max
  unsure (1)..(292): unsure at all n locations; Clone ID: 700559788H1
gagaatctgttaganaattgttgaagaagcttttccatttcgagcattttatttttttaaaattattgtttggttttagggtttgagaatcagcactgtgtcgcgatgtctaatcatcaccgttcttcctccaagaacggtcttccacctcaagaactccttgacgatctctgcagccgatttgtgctaaatgtgccaaaggaagatcttcagtcatttgaaaggatcttgtttcttgtggagtacgcacattggttttatgaagatnattctgtaganaaaatccatctct

SEQ ID NO: 4657 - DNA, 287 bp, Glycine max
  unsure (1)..(287): unsure at all n locations; Clone ID: 700559792H1
agnggttctntccgcgcggtcctgcctcngtggtgtcgctgcnccggcnctgcncgctgaccatanagaacgcgcacaagaagggggcgggcagnaccaagaacggccgcgactcgcagggcaagcgcctcggagtcaagatttaccgcgaccangtngccaancncggctccatcntcgttcgccancgcggaaccaagtttcatgcacgaaagaatgtngggcttngcaaagactataccattttctccttnattgatggngttgtaaatttctganatntcgnc

SEQ ID NO: 4658 - DNA, 285 bp, Glycine max
  unsure (1)..(285): unsure at all n locations; Clone ID: 700559794H1
ctccgcctcgcgaaggnactcgccgagaacaacaagggtgcgaggntgctcgttgtctgctccgagataaccgccgtgacgttccgcggcccctcggacacgcacctcgactcgctcgtgggacaggcactgttcggagatggcgccgcagcgttgatcatcggatcagaccccgacccagcagtggagnggccgatattcgagatgatatcggccgcccagacaatcctgcncgacttgacggtgctntagatgggcaccttcgggagtgggatcacgttccac

SEQ ID NO: 4659 - DNA, 289 bp, Glycine max
  unsure (1)..(289): unsure at all n locations; Clone ID: 700559795H1
aaacactatagcaatagaaacatttgcttttgaaaaacccctcactcttcatcactacactagctancccacatacaatgtcgaccaaatttaaggtgtttcgtgaattcacaagcgatgactcattcctaaaccaagttatccctgaaaacatcaccgaattccaagtgactctgtccctcgctagagactacgatggcaacaactcaaccaacggaaagttcattccttactgggacactgaaaaggtcactcccgaagtgataaaaaaattcaagaaaaatacgaa

SEQ ID NO: 4660 - DNA, 286 bp, Glycine max
  Clone ID: 700559796H1
gcagtgaacaatggcctctgcatcagcatctctgctcaagtcttcacttgttcttgacaagtctgagtgggtgaagggacaaacccttcgccaaccttctgcatcagttgtgagatgcaaccccaccaccccatcaggcctcaccatcagagctggttcctatgctgatgagctcgttaagaccgcgaaaacagtggcttcaccagggaggggtattttggccatggatgagtccaatgctacctgtgggaagcgtttggcttcattgggctagagacatgaagct

SEQ ID NO: 4661 - DNA, 296 bp, Glycine max
  Clone ID: 700559801H1
gcttcaccttctgctctagaaaattcagtgctgaaacatggcttcggctactctctctgtagccaaaccagcccttcaggcaaatgggaaaggcttctctgaattctctggcctccgaagctcatcaggcttccttcccttttctagaaaatcttcagaggatttccattctgtcattgccttccagacctatgcagttggaagcagtggaggatacaagaagggtgtgacagaagcaaaactgaaggttgccataaacgggtttggaaggattggaaggaattcttgaggtgctg

SEQ ID NO: 4662 - DNA, 295 bp, Glycine max
  Clone ID: 700559802H1
gatcgagataactagaaacagtgtgatgaaaatgaaggtccttgttttcttcgttgctacaattttggtagcatggcaatgccatgcgtacgatatgttccctctccgaatgaacactggctatggtgcccgtactccggaggtgaaatgcgcaagttggaggcttgctgtggaagcacacaacatctttggctttgagaccattcctgaagagtgcgttgaagcaacaaaggaatacatccatggcgaacaatatagatcagactccaaaacagttaaccaacaagcttacttt

SEQ ID NO: 4663 - DNA, 292 bp, Glycine max
  Clone ID: 700559803H1
ttcacattcaaaatctagaacagcatcagaatcaatcagcatattctgtcttcttcttctgaaaacaaaaatgcctcgcggtggtggcggtagtccggtggcggaagatctgctcattcagctcgaagtcatgcttcacggccagttaaccatgctccacctccagctcctgctcagagtgacaatcgtggatctctctttgggactgtagctgaaggattggcttttggttctggaagtgctgtggcacacagggctgtggattctgtattcggtcctcgaactattcaac

SEQ ID NO: 4664 - DNA, 84 bp, Glycine max
  unsure (1)..(84): unsure at all n locations; Clone ID: 700559804H1
cnaatctcgntatgcttctctnctaacntctcaccctcnctctcttnctctctagggnttcgttctcattctagatncccnnat

SEQ ID NO: 4665 - DNA, 293 bp, Glycine max
  unsure (1)..(293): unsure at all n locations; Clone ID: 700559805H1
cttcttcccagagtcaacaatgtcagatcccaaccagatttcgtncgctcaanccttcttttgcagcgctttcgccgcctgtttcgccgagttttgtaccattcctctggacaccgctaaggtcaggcttcaactccaaaagaaggtaggggttgatgagggagtgggtttacctaaatacaagggcttgctgggcacagttaagaccattgctagagaagagggtatatcagccctgtggaaaggcattgttcctggtttacaccgccaatgtttatatgggggcttaagaa

SEQ ID NO: 4666 - DNA, 296 bp, Glycine max
  unsure (1)..(296): unsure at all n locations; Clone ID: 700559806H1
aagcgaatagaaatgcggtggagactgntcctccatggatgggaagcctaacccgtattcctgcctccacggacctcctccgcnacgttcaagccgccttgaaacgacanngtcctctcggttcaatgcagtccanttgnataagaccaaggcgcacgctacttcctcaaagaagagcatctcgcacttcttcttctncttccgatgtcaccaattctcaagaagaagcttcttccaaggattcgntcaacnccgtcgtcccttctcaaaacntagatctcagaagaaagtncagt

SEQ ID NO: 4667 - DNA, 294 bp, Glycine max
  Clone ID: 700559807H1
actttgaccttgttggaaacaaccttcccgtcttctttgtacgtgacggcatgaaatttccagatatggttcatgctcttaaacccaatcccaagaaccacatccaagagaattggaggatccttgacttcttctctcactttccagaaagccttcacatgttcacctttttatttgatgatttgggtgttccacaagattacaggcatatggatggttttggagttaacacatatacgctgatcaacaaggctgggaaagcagtgtatgtgaaatttcactggaagaccacta

SEQ ID NO: 4668 - DNA, 221 bp, Glycine max
  Clone ID: 700559808H1
taacgtggttgaaattcagaaattgttcaagcaaggaaaccaggctgttgagaacttcaaccacatggtgaattcccaagcaagcaccaacaatattattggaggtgggttttcattgagtagcaccaagggtttggagcacatggtgatgccgcggattgaagagtgggagagtggagaaccagaaataatgcagaagcaacaactacgttcaagtactt

SEQ ID NO: 4669 - DNA, 294 bp, Glycine max
  unsure (1)..(294): unsure at all n locations; Clone ID: 700559809H1
gaaagtagcanagatgacaggtgggatgtttggaaggaaggggcaaaagataaaggggacagtggtgttgatgccaaagaatgtgttggacttcaacgccataacctccgtcggaaaaggcagtgctaaggacaccgccaccgatttcttgggcaaaggcttggacgcattaggtcatgcagttgatgctctcactgccttcgctggccatagcatctccttgcagcttatcagtgctactcagactgatggtagtggaaaaggaaaagttggaaacgaagcctatttggaaaa

SEQ ID NO: 4670 - DNA, 293 bp, Glycine max
  unsure (1)..(293): unsure at all n locations; Clone ID: 700559810H1
caataatccatggcctatggcaaaggaacagattaacacttcacgggcaacaacataaatggcttcttcaagcataacctgcacctttcactgtaacctccatccttcaatatcccttccaacctcagccactcgtttttccttatctttttcccaccctctactttgcacccacaatggcctttcccttcacccttcaagctccagcttcagagtttttgccaagtttgagaaattccaaagccaaccttcccaatcccaagagcctgacccttcancctcactagaagaaa

SEQ ID NO: 4671 - DNA, 296 bp, Glycine max
  unsure (1)..(296): unsure at all n locations; Clone ID: 700559811H1
tatgcaccaccaataagctccataccttctaattctctactctnctctcacttctctcctatcacatttttccttacaagatggcagcatcatcagcatgccttgtagggaatggtttatctacacggggtaatagaataactcttangaaggacttcaatggaagaagatatctctactcatcttggagattttcattattgaacaacaataaggcatcaaaagcattttccataaaggcatctttggagcaaaggcaagaagaagggagaagggggtttctgaaactgttgctt

SEQ ID NO: 4672 - DNA, 283 bp, Glycine max
  Clone ID: 700559812H1
tgaaaatgagacgaaacatttggaggaaatggaaggagcaaagagtcatctccatttttttgaaatggatcttcttgacatcgactccattgccgctgccataaagggttgttccggcgtaatccaccttgcatgtcctaacatcattggtcaagtcgaagatcccgagaaacagatattggaaccggcgataaaaggaacggttaatgtgttgaaggcggcgaaggaagcaggggtggagcgcgtggtggcgacttcatcgatttcgtcgattatgccaagt

SEQ ID NO: 4673 - DNA, 291 bp, Glycine max
  Clone ID: 700559813H1
gtgagaaagagaaagagagaattcgtaaaccctaatttcggaaagatcggcgatgactgcctccaaggatcgcgagaacttcgtctacatcgccaaactcgccgagcaggccgagcgttacgaagagatggtggaatcaatgaagaacgttgcgaatctcgacgttgaactgacggtggaggagcggaatttgctttctgttgggtacaagaatgtgattggtgctcgcagacgtcctggaggatcctgtcttccattgagcagaaggaagaaacaaaagggaacgagttg

SEQ ID NO: 4674 - DNA, 296 bp, Glycine max
  unsure (1)..(296): unsure at all n locations; Clone ID: 700559814H1
gaacagttgggcataaataatagcaganccaccgaacagcatctnggggaattagagagggtttnctttgttaatntcagtgctaaagttaattgaccgtggncantacagtcaagaatgaanatctctctgagacagttgctgcagcaacttntntangcntcctatgtagaaccctcattggtngcngccatttgtggcatctcggtttcgaatggcccttgagacgatgactgccactcaccagttgaaaattgccgttatgtcagtggcatttgtcgggcgttcactatgtt

SEQ ID NO: 4675 - DNA, 294 bp, Glycine max
  Clone ID: 700559815H1
agagatccagtcaaaacaatatctttctctctctgtttggtttggcctcttgctgtaagaagccagccacagtactgttgcgctcctgtggaaccatcgatgggctttaacaggttccacatcggttgagctttgtgtcagatatgccaatagtgttatccttattcttgtgatatactagtttgtatgatcatattttctcggattgtctagcaagtttagctcaattggacgttgaacgaattattataaatctattaagattatcttcaatttctacgaaaaaaaaatatt

SEQ ID NO: 4676 - DNA, 293 bp, Glycine max
  Clone ID: 700559817H1
gaggagttggataggattgaggagtttctcaaatgggttagctacattttcgaagatggaagcacgtatgaagggactgtttgggatgactatgctcatgggaaaggagtttatgtttctgatgatgcattggtcaggtatgaaggtgaatggtttcaaaacgatgtggagggtcatggtgtagttgaagtcgatatacctgttatagaacctggctcctgggtccaagcttgaagcaaagatgcgagctccagggaaagataatagcaaagggtttcttgtccccagaagac

SEQ ID NO: 4677 - DNA, 291 bp, Glycine max
  Clone ID: 700559818H1
gtcttgctggggcatttgctcttggaataaagaaacttggaactgtggaaattcaggaccttcccttctttgacactgtgaaggttaagacttccaatgcacacgcaattgctgatgctgctctcaaaagtggaataaatttgcgagttgttgatggaaacactatcactgttgcttttgatgaaacaaccacattagaggatgttgataatcttttcaaagtttttgctggtggaaagcccgtctccttcacagctgcatctcttgcaccagaagttcagagtgcgattc

SEQ ID NO: 4678 - DNA, 292 bp, Glycine max
  Clone ID: 700559819H1
tccgaatccacaacacactgttaataattattctgattcacgaaaaacaggaaaaccccaaaactctctttgttcacaatgggcacagagacctcatcggtagatatttcggaacccctgctcttggatcctcacgggaacgaggaaaaggaagagtatttgcgcgaagaggttccggagtggaaggagcagataacgataagagggttggtggtgagtgctgtgttggggagcttgttctgcatcatcacccacaagctaaatctcaccgttgggatcatcccttctctta

SEQ ID NO: 4679 - DNA, 107 bp, Glycine max
  unsure (1)..(107): unsure at all n locations; Clone ID: 700559820H1
caccctttggcataaactggcataaattaggcattgaaaacaccaccanttagttaaagccaggcttnatgctaatttccattnccccattcncattgcccacncag

SEQ ID NO: 4680 - DNA, 293 bp, Glycine max
  Clone ID: 700559822H1
ctaaaccctatggccgacgaagccaaagccaaaggcaacgcagccttctcctccggggactatcctgccgccatccaccacttctccgatgccatcgccctggctccctccaaccatgtcctctattccaaccgatccgccgcatacgcctccctcaaaaactacgcagatgcattagcggatgccaaaaagacagttgaactcaagcccgactggtccaagggttacagccgtctcggtgccgcgcatcttggcctttcccaatacgatgatgctattttggcttacaaaag

SEQ ID NO: 4681 - DNA, 290 bp, Glycine max
  unsure (1)..(290): unsure at all n locations; Clone ID: 700559823H1
aaaaagaaaccttccgattccttcatcgccgccattattcggtggccactgcatgcacctttcccttttctcatccaacaccttctcagatctactccttttcctcttcccaaaatcattctccgattgcncctagggttcacacttcgaatcgccgttttctgtcatgaattgggctccgttagcacacctcgccgactctcgctgacggaggagattcgaaattcggccgccaaatggtttcaatcttgttgtacatcgtcgctttcattgcacgtgcgganccattg

SEQ ID NO: 4682 - DNA, 291 bp, Glycine max
  Clone ID: 700559824H1
gggttattgaagggaaagactactatcatcacgatttgtctggaagcaatgcattgcagattgtaaccctttgattcctagcttttgttatcctttcattttattctcttgttggagtgatcatttatttgcagaaggtgaggagagttgttttttaaaatggtccagttcttttcttatactttgataagtttttaactggttcattctgagtatgagttagctggattatatcaaactacgcttgtacccttggtatgcataattataatcctcatccgttgaactaca

SEQ ID NO: 4683 - DNA, 291 bp, Glycine max
  Clone ID: 700559825H1
gagagagagagaaaatcagaacacgctttgaaactgaaagagagagtaagtgaaggtgtgtgtgtgagagagagaatcaagagagaggagaaaacagagacaaacgctgtctgtgcgagttagagagtaagagaaaccccagaaaatcagaaaatctaacccccattttttctctctctagtttccatttgatcggaggttctcattgtggttttccgattatcgtcgaatcagctccgttctccggttcggttcggtgcaatggagcagtacggccggtccagtgaaggt

SEQ ID NO: 4684 - DNA, 289 bp, Glycine max
  unsure (1)..(289): unsure at all n locations; Clone ID: 700559826H1
gtgggatgtttggaaggaaggggcaaaagataaaggggacagtggtgttgatgccaaagaatgtgttggacttcaacgccataacctccgtcggaaaangcagtgctaaggacaccgccaccgatttcttgggcaaaggcttggacgcattaggtcatgcagttgatgctctcactgccttcgctggccatagcatctccttgcagcttatcagtgctactcagactgatggtagtggaaaaggaaaagttggaaacgaagcctatttggaaaaacatcttccgacctt

SEQ ID NO: 4685 - DNA, 288 bp, Glycine max
  unsure (1)..(288): unsure at all n locations; Clone ID: 700559827H1
gcattttcagaggaacaatggcgggtagggtttcgacgtgcttcttcttcgtgtttgctctttctctccttcttccttttcagatctccgctgaggaatcatcggagaaagagttcgtactcacattggatcactctaactttcacgacactgtcagcaagcacgatttcatcgtcgtcgagttctacgctccatggtgtggccactgtaagaagcttgctcccgagtatgagaangctgcttctatcttgagtagtcatgatcctccggttgttttggctaaaatga

SEQ ID NO: 4686 - DNA, 291 bp, Glycine max
  unsure (1)..(291): unsure at all n locations; Clone ID: 700559828H1
ctgaactcgctgactgaaactcgcaaaaattagggttttgcagtnatggcactgtccaaccgcgtccgatcgggaatctctctcttcaccaaatccacgttcctcacttccgagcgatnccactctccaacgattcctcgttgccccttccatttccttcgcctccagaaattacgccaacgtgccggggcaaaaggaaaacaaagttaaggtccctctggctttgtttggaggttcaggaaactatgcctctgctttgtatattgcatctgtgaaagctaatgcagtggc

SEQ ID NO: 4687 - DNA, 291 bp, Glycine max
  Clone ID: 700559829H1
ggggataagattaaagattcaacaatggcctctgcttctgctactcttctcaagtcatctcctgttcttgacaagtgcgagtgggtcaaaggccagacccttcgccaacctctcgtgagatgtaacccttcctcagcatcagctctcaccatcaaagctgcttcctatgctgacgagctcgtcaaaaccgccaaaacagtggcctcaccggggcgtggtattttggcgatggatgagtcaaatgcaacctgcgggaagcgtttggcatctattgggttagagaacacagaa

SEQ ID NO: 4688 - DNA, 295 bp, Glycine max
  Clone ID: 700559830H1
cttcctctgcgcaggaattaggaatattcgacaggtagagtttcttcaatggctcctaaagttgataagaagaatgatccaaaggcccaggccttgaagactgctaaggcagttaagtcaggtgctacctttaagaagaaggtaaagaagatccgaacttctgtcactttccacaggccgaagaccttgaagaaggacaggaaccccaagtaccctcgcattagcgccccgccgaggaacaagcttgatcattatcagatcctgaaataccccctcaccactgagtctgccatga

SEQ ID NO: 4689 - DNA, 277 bp, Glycine max
  unsure (1)..(277): unsure at all n locations; Clone ID: 700559831H1
ctggctctgaatccaattcttcttcttantgttctctgtntaaggcantacaccatttactacttcatactcaaagtagcttagtgttttgtttagcatatcatggagaataataatcagtcgttttggcaattcagtgaccagctgaggttacaggcatccaatttggcgaaccttctctaaacgattcgatttgggagcaacaattacatctccaagaggcgtgatgaaaggattaattttgacatcaaagtggggggtgagatcaactctttca

SEQ ID NO: 4690 - DNA, 297 bp, Glycine max
  Clone ID: 700559832H1
gttgcgtattagaccatagtctttttgtcattgttgtttcccaacaacgcagtttagcctttgagagcatcagcaatcacatggtgatcagaatatcattcagcaattgaagatcagtggcatcaggcataggctagcaagcaatgatatggctttcttcccagcaaatttcatgctacaaacacctcaccaagatgaccatcaacctccaccttcactcaactcaattataacttcatgtgcacctcaagagtaccatggtggaggagcatcctttcttggcaagagatctatgtc

SEQ ID NO: 4691 - DNA, 281 bp, Glycine max
  Clone ID: 700559833H1
tgaaaatgagacgaaacatttggaggaaatggaaggagcaaagagtcatctccatttttttgaaatggatcttcttgacatcgactccattgccgctgccataaagggttgttccggcgtaatccaccttgcatgtcctaacatcattggtcaagtcgaagatcccgagaaacagatattggaaccggcgataaaaggaacggttaatgtgttgaaggcggcgaaggaagcaggggtggagcgcgtggtggcgacttcatcgatttcgtcgattatgccaa

SEQ ID NO: 4692 - DNA, 288 bp, Glycine max
  Clone ID: 700559834H1
ctttcgcttctgaatcttcaacaatggtgctcgaggcgacgatgatctgtatcgacaattctgaatggatgcgtaacggtgattactctccttctcgatttcaagctcaagcagacgctgtgaatctcatttgcggtgctaaaacgcagtctaatccagaaaatacagtgggagttctcacaatggcagggaaaggcgttcgtgttttggtcacccctaccagtgatctgggcaagatcttagcctgcatgcatggcttgcaacaatgcattcatctgagctgagtta

SEQ ID NO: 4693 - DNA, 286 bp, Glycine max
  unsure (1)..(286): unsure at all n locations; Clone ID: 700559835H1
cttctgcgcttcttctctggtctctggcttccttggtacgggaanaactcaatcttgtccatttccctttggttttnctctcttcgatctcttcaccttccattcgaccaccctcttatcacagctcgcgttaacttaagccctctccgttgagtgactagttcgtgaatattcgcttgagatttgactgcgaantggttttagagggtttctccaggtgtggtttgattttcagtttctgatgctgaagaaataaaaaagcttgaaggctttgctcttctgtgtg

SEQ ID NO: 4694 - DNA, 281 bp, Glycine max
  unsure (1)..(281): unsure at all n locations; Clone ID: 700559836H1
ggccactcgtttttatatcatttcattatnttcttctcccttcgatttctccagaacagcaagggagaatcaattcctcatcgttgcaattcttccctctctagattctcatctttcctctcttctatctccttcnnnnnnnnnnnnnnnnnnnnnccacagcttcatattatatanctagntcttcattttctcttgttcaatcaaggttatgctttaaaattctgaaactcacagtttcaggcaaattttagcctaaagatctgtgcgttgacccttgg

SEQ ID NO: 4695 - DNA, 290 bp, Glycine max
  unsure (1)..(290): unsure at all n locations; Clone ID: 700559837H1
ggaaaaataaagggatcaaatttaagttccttgatctaataagatccttgcttttaattgtactactcatgaagagacttggcagttcggatacactgggtgctctcatgacgatttgtccaccaacagacgaacanagtccgaggaacaaccacgtgtatgggaaggagttccagtccatgctggaaggactcgacgaagaagggtgcgtggaagaagcanggcaccactctgagaagaaacgacgactaaacgtagatcaggtgaaggccttggagaagaacttcgaa

SEQ ID NO: 4696 - DNA, 291 bp, Glycine max
  Clone ID: 700559838H1
agaacacactaccctcaacatagtaaagcagctggtgcaagtgaagcaatggctcaaaccatgttgctcatgtctagtgtctctagcagttattccgtggatttgaagaaagaccttttcctccaattgcagagtcaaagtttaaggcctaagttctctcaactctcattcaacccacttccaccatcaacttcttccttttcttcaccccgtacattcacaaccctggctctcttcaaatctaagacaaaagccgctcctgctaagactaaggttacaaagccaaagcaa

SEQ ID NO: 4697 - DNA, 288 bp, Glycine max
  Clone ID: 700559839H1
gttttgaatcggttatgggttgctctgagatgattgaagaatccattatagagactcctgctactgaatttacaccgaatgttcgatctggttgctgtgctgatattggaccgagggggtctatggatgatgagcatattcagatagatgatctagcagcccaccttggatttgtgttcaaacaccctatgccgagtgcattctatgcagtttttgatgggcatggagggcctgatgcagccgcctttgtgaagaacaatgctatgagattattatttgaggatgctg

SEQ ID NO: 4698 - DNA, 290 bp, Glycine max
  Clone ID: 700559840H1
aattgaagttgaagtcttgcccttctctcttcaactccaaacacaagacatcatcatccatggctgcctccgtctccactgtcggagctgtcaacagagctcttttgaacctgaatgggtctggacctggggtttcagctcccagttcatccttctttgggagcagcttgaagaaggttattggctcaagggtccccaacacaaagatttcctctggaagcttcaagattgttgctgtagaagagaagaaagagattgaagagacccagcagaccgacaaggacagatgg

SEQ ID NO: 4699 - DNA, 289 bp, Glycine max
  unsure (1)..(289): unsure at all n locations; Clone ID: 700559841H1
gtcgcaggcgcagagtagagcagcacagaagagggaaaacngcaccgccgccgtagaagaaaacaaccatggtgcacgtctccttttacaggaactatgggaagacattcaagaagccgcgtcgtccgtacgagaaggagcgtctcgacgcggagttgaagctggttggtgagtacgggcttcggtgcaagagagagctgtggagggtgcagtacgcgctcagccgcatccgcaacaacgcgcggaacctcctcaccctcgacgagaagaacccgcgccggatcttcga

SEQ ID NO: 4700 - DNA, 287 bp, Glycine max
  Clone ID: 700559842H1
gctcgcttcttccttctctcatcaacaacatgcagatcttcgtcaagactttgaccggcaagaccatcaccctcgaggtcgagagcagcgacaccatcgacaacgtcaaggccaagatccaggacaaggaaggtatccctcctgaccagcagaggttgatttttgctggtaagcagctggaagatggtcgcactcttgctgattataacatacaaaaggaatcaacacttcacttggtcttgaggctaaggggaggtaccatgattaaagtgaagactttaactggg

SEQ ID NO: 4701 - DNA, 290 bp, Glycine max
  unsure (1)..(290): unsure at all n locations; Clone ID: 700559844H1
ccggtatgctgatgaaagtncattctttccagaatgtgaaggaaaaatatatagcttctacatcatgggcatcggnccacttcaaattccggactatgctgtttccttggatgataaagaccacctctttgccaaggttgtgagccagaaagatagtagcttaacacatatagtgtggaatccaggatctgaatttgcattctgtgattgttcttggtcaatgcaaggtaacctttgcaagcatgttgtcaaagtaaacatgatttgtgaaaatcttaaaggttatcaac

SEQ ID NO: 4702 - DNA, 286 bp, Glycine max
  Clone ID: 700559845H1
gtccctgctattgttggtgttttggggtccataaagttgccttatccttctagagcctttgatatggctcattgttctcgctgtttgattccttggggagcaaataatggaatttatatgatggaagttgatcgagttctaaggcctggtggttattgggtgctttcgggtcctccaatcaattggaaggctaactacaaatcctggctgagacctaaggaagaacttgaggaagagcaaagaaagattgaagagactgctaagcaactttgctgggagaagaggt

SEQ ID NO: 4703 - DNA, 290 bp, Glycine max
  Clone ID: 700559846H1
ggagttgtaaattaagagcatggctgcacaagctcttgtatcatcatcatctcttaccttctcagccgaggctacaagacaaagtcttggaccaagatcactccaatctccatttggcttctcaagaaaagcctcctttcttgttaaggcagctgctactccccctgtcaagcaaggatcagacagacctttgtggtttgcatcaaagcaaagtctttcctacttggatggcagccttccgggtgactatggatttgaccctctgggactttcggaccctgaaggaacag

SEQ ID NO: 4704 - DNA, 292 bp, Glycine max
  Clone ID: 700559847H1
ccagtctgcaagaaatttatgcaagatcctatggaaatttatgttgatgatgaggccaagttgacccttcacgggcttgtgcagcactacatcaaattgaaagaggaagaaaaaaaccggaagttgaatgatcttcttgatgcactggactttaatcaagttgtgatctttgtgaaaagtgttagcagagcagctgagctggacaaactacttgtggagtgcaactttccatctatatgcattcattctggcatgtcccaggaagaaaggttaaagcgctataaaggtttca

SEQ ID NO: 4705 - DNA, 288 bp, Glycine max
  unsure (1)..(288): unsure at all n locations; Clone ID: 700559849H1
aatttaattacaactctgtatgtgaattcttcttgnagctgatggcgcaaattctgctccatgggactcttcatgccactatctatgangtcgatnagctcaaaattggtggaggcaactttttaaccaagatcgtacaaaacatcgaggagactgttggtattggaaaaggtgtcactaaactatatgcaaccattgatctagagaaggcacgagtggggaggaccagaattattgaacaaagagattaaaaatccaagatggtacgagtcctttcatatttattgt

SEQ ID NO: 4706 - DNA, 286 bp, Glycine max
  unsure (1)..(286): unsure at all n locations; Clone ID: 700559850H1
gttggaaagaaaccctagcaagcggaacaatggcagacgttgaggtcgatgtgnnnnnnnnnnnnnnnnnnnggcagccgaagaagagaacgttcaagaagttcagtttcaggggcgtggatctcgatgcgcttctggacatgtccaccgatgaactcgtgaagatgttcagtgctcgcgcacgtagaaggttccagagaggcctcaccagaaagcccatggccttgatcaagaagcttcgcaaagcgaaaagagaagctccaccaggtgagaagccagaacctgt

SEQ ID NO: 4707 - DNA, 286 bp, Glycine max
  Clone ID: 700559851H1
caaaaggttcgcagctaggcaggaacaatgaatcactcatacgcgaatcaatcggctcaagaagttaatatagttacagaggacacaagaagatctgcaaattataaacccaacatttggaaatacgattttctgcagtcacttgacagtaaatatgatgaggaagaatttgttatgcagttgaacaagcgggtgacggaagtaaagggtcttttgttcaagaggcaagcgttttgcaaaaactagagttggctgattggatccaaaagctaggccttgccaacta

SEQ ID NO: 4708 - DNA, 284 bp, Glycine max
  unsure (1)..(284): unsure at all n locations; Clone ID: 700559852H1
gcagactttgctggtgaagcgaattttgtttcctagtcgttggcctttcactgtctctctctccttctcctcttatctgaatcatcctctctctgtgagtnaggtgactcgttgttgtttgtgacccggcgattcgttcctttgactccattcgaagcaaccctttgtctttcttaagcagtttcctgtgatgggctttggatttttcttttggattccctgtgatcacctgggaactggggtgttcaaattgaatttttgtgaggtatgctgtgtntggggnt

SEQ ID NO: 4709 - DNA, 288 bp, Glycine max
  unsure (1)..(288): unsure at all n locations; Clone ID: 700559856H1
tcttcttggatcatcttngttaagctgcagatcagaatagaatantaataaataaagataagatggagactcatttggttttnntgcttggnttgatcttcactctagttgccngcgttggagcccaagcccaaggcncatccanctctcctgcgcctcccacaccccaagcatnttcanctcccgtncagtcttctccgccanctgttcnctcttnacntccaccctctcagtctncaccaccagcttncannncccctccatccncactcagctntcctnntnctt

SEQ ID NO: 4710 - DNA, 285 bp, Glycine max
  unsure (1)..(285): unsure at all n locations; Clone ID: 700559857H1
aggaggtgaggcagattattaaggagaaagaagaagctgttcgcaaccaagactttgaaaaggctggagagctacgtgatagngagatggatcttaaggcacagatctcaacacttgtagagaaaggcaaggagatgagcaaggcagagactgaggcaggggatgaaggtcctattgtgactgaagctgacatacagcatattgtctcatcctggactggtattcctgttgagaaagtctcaacagatgaatctgatcgcctcctgaagatggaagagactttac

SEQ ID NO: 4711 - DNA, 286 bp, Glycine max
  unsure (1)..(286): unsure at all n locations; Clone ID: 700559858H1
tgatccacagatcgttacaagattcatccaagtgaagtaacaacaacctattttaccccaagaaaactgatggcgacatactttcatcatggtaactccgaaatccaatcgggtggcgccgacggactccaaactcttgtcctcatgaaccccggctacatccactactccgacgcnnnnnnnnnnnnnnnnnnnnnatcctcactncgccgccggaaacctcgtgtttctcaaccctgccgcggttgccgggggcaacaacaactcgtttaacccccacgcgccg

SEQ ID NO: 4712 - DNA, 234 bp, Glycine max
  Clone ID: 700559859H1
gagaaagaaaagaatggcaaagttaataaaattctttgagttgaacacaggggccaagattccttctgttgggttaggcacttggcaagctgagcctggtgttgtagccaaagctgtcaccacagccattctggttggatacaggcatattgattgtgctcaagcgtataacaatcaagcagagattggttctgctcttaagaagctttttgatgatggtgtggtgaagcgtga

SEQ ID NO: 4713 - DNA, 285 bp, Glycine max
  Clone ID: 700559860H1
gtgccacttctttcggacttccaagtggaggaatcgaaattcttgtttgaagcaaagactatacagagaatggaactccttgtgttgtccactctcgaatggaaaatgaaccccgtcaccccaatttctttctttcaacactttctcacaagccttggtttaaagcgccatttgcattcggagtctctccgtaggtgccaacgtcttcttctctctgtcattgcagattcaagggttatgagttatcttccttctacagtggctgctgctataatgatccacgtt

SEQ ID NO: 4714 - DNA, 285 bp, Glycine max
  Clone ID: 700559861H1
aacctttgtgacttgccatgtgttccaagatataatctccaactccaaacaaacctctttacatgacacatgtgtatgtttgtgcatgataaattctcattcatttttgggctgcaaatccaactgggtcattattactggttctgagtggtcttgcttcagatcaggtttttttgctaagaacaactcagattttcagtacagtgttactgccaagcagaagttgaattaacgtggataatgattaccgcgcttgaagagtagaagcaataattcagcagtgtt

SEQ ID NO: 4715 - DNA, 288 bp, Glycine max
  Clone ID: 700559862H1
gtgccgcgttaaccgcgccggagactcggcgtactcaccgctgaactcggggtcgtcgtcttcgtcgttcagcgaccgcccccccacggagatggcgccgctcttccccggctgcgactacaaccactggctcatcgtcatggagaatcccggtggtgagggcgccaacaagcagcagatgatcgattgctacatccaaaccctagccaaggttctcggcagtgaggaggaagctaagaagaagatttacaatgtttcctgtgagaggtactttggattcggctgcga

SEQ ID NO: 4716 - DNA, 290 bp, Glycine max
  Clone ID: 700559863H1
ggcgaaggaagcgccagtgcaaacgactataaagtagcaaagtccaagatcgcatcgttggtggctgatgtcttctccaacacagaggtagcagaaaacaaggttgtgaaagtgcactcggatcccagtgcccccttgaagcgtgtagatgaacttttcagccctattcctgaggatggaagaaggaaagcctatgctgaaatgcaggaaaaagcaaaggcagaggaagaagcaagagtggcagctgaaaaggcccgtgaagcttctgaatcagcaaagaagttggaaga

SEQ ID NO: 4717 - DNA, 285 bp, Glycine max
  Clone ID: 700559865H1
agcttatgctgtttgttcgcaattcgcatggaaccatcagtttcagctttgtgttgcagctccaccaaaaccttgggagaaagcagcatcatcatctgggccagcaccttttaaacccccatcagcaggtagcacaagtgatgtagttgaggcttcagggactgcaaaacctggcgaaatagttccagcttccgataagactgcaactgtcaataggaatgctcttgggagaccccttcccacaaggccatgggagcagaataatggaagtaccagctatggagg

SEQ ID NO: 4718 - DNA, 256 bp, Glycine max
  unsure (1)..(256): unsure at all n locations; Clone ID: 700559866H1
acacacactctnatgttttggatttggcttaagtgactgtgttctgtttcttcaattgcacaaattgttggacttctaaattccatcactttgaagaatagtgtgataagtattaggaataagaagctgccactcatgacgaagcagaaaattcgcaacgctcttttggtgcacttggtgattctcttcttcttttctacatcggttgtntcagcgagagttgtgtctctcttgcagaactacgggaacccgattt

SEQ ID NO: 4719 - DNA, 282 bp, Glycine max
  unsure (1)..(282): unsure at all n locations; Clone ID: 700559868H1
gccgccatcactaaaaaggactccatcatcaccgcctaccgcgaccattgcatcttcgtcggccgcggtggcacgctcctggaggtcttcgccgagctcatgncccgcaaggaaggatgctcgaaggggaagggcgggtccatgcatttttataagaaggagaganggttttatggtgggcatgggattgttggggcgcaggttccgttggggtgtgggttggcgtttgctcagaagtattctaaggacgagagtgtcacttttgctatgtatggagatggc

SEQ ID NO: 4720 - DNA, 285 bp, Glycine max
  unsure (1)..(285): unsure at all n locations; Clone ID: 700559869H1
gccgccatcactaaaaaggactccatcatcaccgcctaccgcgaccattgcatcttcgtccggccgcggtggcacgctcctggaggtcttcgccgagctcatgggccgcaaggaaggatgctcgaaggggaanggcgggtccatgcatttttataagaaggagagtnnggttttatggtgggcatgggattgttggggcgcaggttccgttggggtgtgggttggcgtttgctcagaagtattctaaggacgagagtgtcacttttgctatgtatggagatggcg

SEQ ID NO: 4721 - DNA, 285 bp, Glycine max
  Clone ID: 700559870H1
ctctcttctgctctcactctcactctctctcacttggggttgaagatgagaatttgtggagcagcaatcagcagcagctacaccaccacgtccaattcccttttagtgtttgcttcctcttccctctccagtcctgcaaaaaccaagttcctgccctcactttctagattttctgtcaagcgtccgtacttcctttcccaaacttatccgcgcattgctgtgaacaagccctccatgaacctgttgaacagactcgggtttggcagcgcaagagcaacagagaac

SEQ ID NO: 4722 - DNA, 284 bp, Glycine max
  unsure (1)..(284): unsure at all n locations; Clone ID: 700559871H1
attgtgtgttgccactctcctctcttgttgtacacttgtnccttttggtttgcagaaaggaacatggaagctgtgtgtgcntttnctgttggcacacttcacatcccaacagcanatgaaanatcaaactcctttaggaaatccatattcttgagcaancaagtggcttcaccagtttcattggtttttctcaggggcagttcaaaatccaagcttttaactgccttgtcaccccctccattgacagaatccagtaaccaacctgaggctgagccagantttga

SEQ ID NO: 4723 - DNA, 286 bp, Glycine max
  Clone ID: 700559872H1
cggtactttaatgaggacagtgatgaggaggatagtgcttctgcatctgttccacgcaatcagaaaggaccaccagcaacctaatctatccaatggagttgctgcaagctattcacagttaagtccaaggtcactggttgactatgaggatgatgaggatgatgaagattataagccacccccaagggagcagccagaaacttctgaggaagatgatgggataatggagtctctcaggctgaagaggaaattaccttccaaagataaggagcctgaacttgagaag

SEQ ID NO: 4724 - DNA, 282 bp, Glycine max
  Clone ID: 700559874H1
gacctgaggagcaaagcaaggactctcccaggaccagttagcgacccttcagagcttcccaagtggaactatgatggttccagcacaggtcaagctcctggtgaagacagtgaagtgattttatacccacaagccattttcagggatccattcagaaggggtaacaatatcttggttatctgtgatgcctacactcctgctggagaacctattcccactaacaagaggcacgctgctgccaaggttttcagccatcctgatgttgttgctgaagtgccatgg

SEQ ID NO: 4725 - DNA, 283 bp, Glycine max
  Clone ID: 700559875H1
cgcattcagcttcagaagaaagtgaacctatttggtgttttcctaaccgaatcaatctttattctttggttattcttcgtcttctacatgggtcgccttcttctctttctcattattcccagccttgtcgcattgtctttcctctcagaggtacaatcagcgtcgttcaagattgtgaacaagtgccgccacacgatatggccgggattactctccggtgccacctcgccgccgcttcccaccaccggattcaccctcgagagcggcaaatcgaggaccataa

SEQ ID NO: 4726 - DNA, 284 bp, Glycine max
  unsure (1)..(284): unsure at all n locations; Clone ID: 700559876H1
aacaaatcaaagccatgggccacctccaacttctctattgttctctccgtctccctagccttctttttggtgctacttaccaaggcacactcgaccgataccgtttctttcaccttcaacaagttcaacccagtccaaccaaacattatgctccaaaaagatgctagtatttcatcctctggggtgttacaactcaccaaagttggcagcancggcgtgcccacctcgggatctctcggtcgtgccctttacgctgccccaatccagatttgggacagcgaaac

SEQ ID NO: 4727 - DNA, 283 bp, Glycine max
  Clone ID: 700559877H1
gggtttgcagtcactgctttgtttagatcagaaccagatcgtgttctcttcttccattggcaaacatggcaactcaaatgagcaagaagagaaagtttgtggcggatggagtgttcttcgccgaactgaacgaggttctgacacgtgagttggcggaggacggttactccggcgtggaggttagggttacgccgatgcgcaccgagattatcatcagagccaccagaacccaagccgttctcggtgagaagggaaggagaattagggaacttacctcagtggt

SEQ ID NO: 4728 - DNA, 285 bp, Glycine max
  unsure (1)..(285): unsure at all n locations; Clone ID: 700559878H1
tcgtgcgctgttcctctgtctgtcgtttttgttttcagaccaaaccctagctccgcantcgcaaccatgtcgaccaagcaangtggaaaagctaagcctttnaagaaacccaagtctgataagaangattacgacgnggttgacatggctaacattcagnagannaaggaagaggagaaggcgctaaaggagttgaaagccaaggcgcaacagaagggaagctttggaggttctgggctcaaganangtngnnananataagggctctttatcntgattgtatnc

SEQ ID NO: 4729 - DNA, 289 bp, Glycine max
  unsure (1)..(289): unsure at all n locations; Clone ID: 700559880H1
aacctctctctctcncttcactacactttcattcatncattcancanacagangcaagaggccagagagtgtggtgtgtgtgtgtgtctctctcnttctctgcttttnagtaattaaatgagagcaaaaatgacgctcaaaacagcggcggtggctgtggctatagtgtgcatttctgcctttagcatcactgtggtggctgaagatccatacaggttcttcaactggaatgttacatacggagacatttatccacttggtgttcgccaacagggaatacttatcaacg

SEQ ID NO: 4730 - DNA, 282 bp, Glycine max
  unsure (1)..(282): unsure at all n locations; Clone ID: 700559881H1
cgactcctttgttgcgttgtattgcctctctcgccgaaaccctcgtttccaacttctacagaatccatttcttcgccatggatattgaggaggacatccgttctttgcagctcgattcggcagcagaagacaataatggggtggtaaatccanaggatggaaagccagaagaagttgagaaatatgataagatggatgaagatccaaagcaggaggttgaggctganccaaaggctgttgaggctgagccaaaagtgaaagatnaggngattccttctgttc

SEQ ID NO: 4731 - DNA, 283 bp, Glycine max
  unsure (1)..(283): unsure at all n locations; Clone ID: 700559882H1
gaantatagcatttcgcgatttattggtaatccactttngatntctctattaaccantaatttncggactattaccatggttagagtgaatngtttgangtcangncgnngtgtagtacgctttctaccactangtnaatacagngatgaaatggttncnatngaatnatgagantanngtggcggtatannnnactcangncgagaaantggcntgaatnctatttgctgacggcaagaaatggggaacgggttaagtaacccgccctngnagtanaatgcg

SEQ ID NO: 4732 - DNA, 280 bp, Glycine max
  Clone ID: 700559883H1
tctctacaatgttacaacaaaagagatggttcactggccacactgtaatcttttttggaaagcattctcctcttatgtgcatgctctttggtaaaatccagttcagagcaggcttgtcttatttctgggtttccactttgagcttaagaggtgtgttcctagtttgctacattgctctacttgcgtattgcatgattaccaacaccaatatctttcccaagggacttggcctttggattccaattaccctttttgtgattataacgtatatactctatta

SEQ ID NO: 4733 - DNA, 282 bp, Glycine max
  Clone ID: 700559884H1
gttgatctcatgcttagttctatttgatccataatgtagattccaatgaatcacatcaacagatacctcttaaaaattggtttgagtgtcatgatctaaattgcatgcaattgttgcaccttcaaaatcttaagttgtggctaataatattaaaaatcacacaaggaacatttcttaacgtgttgttattggtgtgaaactttttctatgagaaattgggagccctccattgatgtatggttactgtttctcttggactattgctgttttttaaatgggtgg

SEQ ID NO: 4734 - DNA, 280 bp, Glycine max
  Clone ID: 700559886H1
tgcctcttgagcgtaaccagtgtttgctctattctatgttgtgtgatagagtggaagaccatgagtgtgcttgtagaatcacagacactgatataattgtattaggttatgaattctgtaactgtgttttatatgtaacatagctactgaacctgaaattgtctgtaacagtgtaacatgaaaattgtgtgtatctgtccacatctaggattgtttgctttgtgttcttatcagtgatcacccatattaaactgttatgctgtatgagactatgtgaaca

SEQ ID NO: 4735 - DNA, 283 bp, Glycine max
  Clone ID: 700559887H1
gccactttctgagtacaatacaacactgccatggctgcctcagtctccactattggagctgtcaacagagctccactgagcttgaacagctctgaagctggagattcggttcccagttcagccttctttggcacaagcttgaagaaggttactgcctcaagggtccctaacgtcaagatttcttctggaagtttcaaaatcgttgcggcggagaaagagattgatgagcaacaacagacaaacaaggacagatggaaaggtcttgcctatgatatttcagatg

SEQ ID NO: 4736 - DNA, 282 bp, Glycine max
  Clone ID: 700559888H1
accctgacaagattccttttgttcctatctctggttttgagggagacaacatgattgagaggtccacaaaccttgactggtacaagggtccaactctgcttgatgcacttgaccagattagtgagcccaagaggccctctgacaagcccctcaggcttccccttcaggatgtgtacaagattggaggtattggaactgtgccagtgggacgtgttgagaccggtgtcttgaagcctggaatggtggtgacttttgcaccaactggactgacaactgaagtca

SEQ ID NO: 4737 - DNA, 278 bp, Glycine max
  unsure (1)..(278): unsure at all n locations; Clone ID: 700559890H1
ctttgatttttttttttccttttcaaacataaactcttatcctttncttagtgattgattctttgaaacaatctcagtatcaaccagtttgtgtagtgaatgtctggcctttttgcgtggtctgtttatgtctagtttttgtgtcatggaaaattgatgcatcatgctattttcttagtaaagaaggaatcaatctagtgcattgtgcaaatcagttttcctctttttgtcttgcaattacccgctgagtaatgttttttggcctaatggactaattc

SEQ ID NO: 4738 - DNA, 280 bp, Glycine max
  Clone ID: 700559891H1
aagaaaatcttctcagaggcatatatgcttatggttttgagaggccttctgcaatacagcaaaggggaattgttcctttctgcaagggtctggatgtgattcagcaggctcagtctggaactggaaagacagcaacattctgttcggggattttgcaacagcttgactatggattggtacagtgtcaggctttggttttggcaccaacaagggagcttgcacaacagattgagaaggttatgcgagctctaggtgattaccttggtgtcaaggttcatgc

SEQ ID NO: 4739 - DNA, 279 bp, Glycine max
  unsure (1)..(279): unsure at all n locations; Clone ID: 700559892H1
gttgtatcccagtggagatctttcactctcaatctcaacttccacaacacaccttcttaanattggccatgttccgcaggtcgattttgcnaatatcatctcgcccanctcttaaaanaaaccccagacgttttgtataccagatacctttacatctatcttcacaaaagaatttctcaactgtgtcgaaaccagggggtgcctcagcttctgggtctccgggcaagccagtgagtctaatggcaccctatccaagtntttcattggaagtgtagcttt

SEQ ID NO: 4740 - DNA, 254 bp, Glycine max
  unsure (1)..(254): unsure at all n locations; Clone ID: 700559894H1
gttccaacatctatcacacttcttagttctttntggctctttccatgatgggactctcctacatctccaagagttctcttcttgagtctctttgtaactctttccatgattttacatttgagttcagccaggaagttgtctgagtcagacccccaattgcagttccaataccacagaggccctctcctcacaggcaaaatctccgtaaacctaatttggtacggtaagttcaaaccttctcagaaagccattgt

SEQ ID NO: 4741 - DNA, 282 bp, Glycine max
  unsure (1)..(282): unsure at all n locations; Clone ID: 700559895H1
agcaatcaaggggtgcatgcatttattgcccaaatcagggattcagatggaaacatatgtccaaacatccgaatagctgattgtggtcacaaaattggtttaaatggagntgataatggccgtatctggtttgataatgtgaggatacccagagagaatttgttgaattctgtggctgatgtttcaccaagtggtgaatatttgagtgcaataaaaaatgcagatcagaggtttgctgcattcttagcccctttgacttctggtcgtgttaccatgctgtta

SEQ ID NO: 4742 - DNA, 286 bp, Glycine max
  unsure (1)..(286): unsure at all n locations; Clone ID: 700559896H1
taagtgttcactgcgctctctctcaggttaataaaaagggaaccacaactaccaccagttagcaatgaagtcataggtcttcaaatctgcatggtgtgcaagtctcccgggatgtgacaagtctttcctgatagtagggtaatagaagtgacaagttgttagtgatagtaactcaggccctcggaatcttcagagaagctagcagaagttcatcagagaaggttacatattagatggcaataacaccttttggtagtacatcttctgcacaatggggaatncatcc

SEQ ID NO: 4743 - DNA, 134 bp, Glycine max
  unsure (1)..(134): unsure at all n locations; Clone ID: 700559901H1
cttgacgtatggtaacatgcttgtccaagaacaagagaatgtcaagngagtccaattggctgacaagtacttgaacgaggctgcacttggaaatgctaacgaggatncnattancaggggaacttncttccaat

SEQ ID NO: 4744 - DNA, 138 bp, Glycine max
  unsure (1)..(138): unsure at all n locations; Clone ID: 700559903H1
atgcgatctatttttnttcagtggtgcatttaataataaacatattgatgttatggtataagaagaaaaatggagcatgttttggnnccnaagatttcctcttaatgcagaagattacacattatntgaagnggcngg

SEQ ID NO: 4745 - DNA, 92 bp, Glycine max
  unsure (1)..(92): unsure at all n locations; Clone ID: 700559904H1
tttctctcttcgcctggtcttggcatctccgcagcaccaccacnnnncnttctgcttagaccaggtcctctctctctctagagagnaatnag

SEQ ID NO: 4746 - DNA, 186 bp, Glycine max
  unsure (1)..(186): unsure at all n locations; Clone ID: 700559905H1
catacatcatggntaccatacaaagtcatcctgcacaagctgctcttggtngtggtgttcggaatttncaaanaatccgtgccttccttcngattcggntnagggattntggntactggattttgatgctggngatgctcggcggcagcctcctgttgataccacatggcagcagatntatttttg

SEQ ID NO: 4747 - DNA, 310 bp, Glycine max
  unsure (1)..(310): unsure at all n locations; Clone ID: 700559909H1
ctcatcacttactggaagccttgttgtgagtaagagaaaaggcttcctgcaccgagcacaccaacttgatacctctgattctttctttgcttagaattccacagaatatggagacacnttcttttcaatcactccccacctttggaattcaagggtttgagcaaggaggaggaagactcattgctagggcaagtggaaatatggaggtacatgacatgcttcacggactccgtggccttgaaagctgcatagagctcgtatagcggacatactagaccgttatggtaaaccactatccttgtcgcaaatg

SEQ ID NO: 4748 - DNA, 304 bp, Glycine max
  unsure (1)..(304): unsure at all n locations; Clone ID: 700559910H1
attaatggatgatatgctgcagataagatgcaagaacccaactctatgtagcaaagaaggtaccaaagtggtattgactgatcttaatcacaacaatcaaactgattttgtgctaagcagcagagcctttgcgggcatggctcaaaagggtatgggccaacaaatactgaagcttggcattgctganattgaatacaagaggtaggcctaaatcaaatcaactttagttttagataagttttattatccnttcttcttgctttgcgagtggttttggttttggttttggtttggtccgtcccca

SEQ ID NO: 4749 - DNA, 312 bp, Glycine max
  unsure (1)..(312): unsure at all n locations; Clone ID: 700559913H1
ttcttctctttatcagaaacgcgcgttgctcggataaggttgtgctgcgccgactcactggtactttgcttaancatggcggctgagaagtcaaacattgcaaaagatgtgactgaattaattggcaaaactccattggtatatctcaaccacatcgtggatggttgtgttgcncaagttgctgccaagcttgaaatgatggaaccttgctccagtgtcaaagacaggataggatatagcatgattgtgacgctgaggagaaaggactcatcacaccgggtgaaagtgtcctcatgaacctaccagtggaaa

SEQ ID NO: 4750 - DNA, 311 bp, Glycine max
  Clone ID: 700559914H1
ctcaaccatctgatttctgcaaccatgagtggggttacctgttgtctgaggtttcctggacaactgaactctgacctcaggaagctggctgtcaatctgattccatttccccgtcttcacttctttatggtggggtttgcacctctcacttctcgtgggtctcagcaatatgtctcccttactgtcccagagctgactcagcaaatgtgggatgccaaaaatatgatgtgtgctgctgatccccgcacggccgatacttgactgcatctgctatgttcaggggaaagatgagcaccaaagaggttgatgaa

SEQ ID NO: 4751 - DNA, 316 bp, Glycine max
  unsure (1)..(316): unsure at all n locations; Clone ID: 700559916H1
gcaganttcaagcagggaaaagttgaatacagggcagacaaaactggaatcgtgcacttaccttttggaaaagctgactttccagaagaggatcttcttgtaaacttgcttgctgcagtgaaatcagtagaggcaaacaaaccttcaggtgctaaaggtgtgtactggaaaagtgctcacatatgctcagccatgggaccttcaatcaggttaaatatcagggagatgctgattacagacctccatcagaagaaccctcacatgtaaatgttcgtttggcctcagtcagctatcccgggtgccatgtgagatcttg

SEQ ID NO: 4752 - DNA, 319 bp, Glycine max
  unsure (1)..(319): unsure at all n locations; Clone ID: 700559917H1
caaccaccacgcttccacaaccaaaaccaacgnttcctaattcatcccaagctgggtttcgaacctgccaggtctcgatcacgtcttgccatggcttcacctgccaacacctccgagcctaagatcgtcaccggcacnnccggttacatcctcgaagacgttccgcatttcactgattacattcccaatctcccaacataccctaatcctttgcaagacaaccctgcttattcagttgttaagcagtatttgtgcatgttgatgacagcgttcctcaaaaggtcgttgttcacaaagatggtgcaagaggggtacattt

SEQ ID NO: 4753 - DNA, 136 bp, Glycine max
  unsure (1)..(136): unsure at all n locations; Clone ID: 700559918H1
cacaagttgtgttcctgttgtgaatatcttaaatttctcaacttgtgtttgtntgtncgtcctataattgtaggttcagttgcatgnttatattttggttcacatatncacngtctctcngtanctcctcngncca

SEQ ID NO: 4754 - DNA, 311 bp, Glycine max
  unsure (1)..(311): unsure at all n locations; Clone ID: 700559919H1
ggaggttcctcctctgcccaagaatcggaaggctgcttgtgggcaacacaaagaagagattcttagtcagcttcgggaattggccaagtnctgagccattggaccttgaaccatatgtgtcatcggggaacttgtcctcgggttttgaacgtgaaccagaggctgatatctttccttctcatgagtggcatagagaaagcagcgagcctatgtatcaggttgttcctcctgacccattaatgagaattatacagaagaaattccattaaacattctacttctgctgttggggaaactcaaacctacggtga

SEQ ID NO: 4755 - DNA, 307 bp, Glycine max
  unsure (1)..(307): unsure at all n locations; Clone ID: 700559921H1
ctcatcacttactggaagccttgttgtgagtaagagaaaaggcttcctgcaccgagcacaccaacttgatacctctgattctttctttgcttagaattccacagaatatggagacgcgntcttttcaatcactccccacctttggaattcaagggtttgagcaaggaggaggaagactcattgctagggcaagtggaaatatggaggtacatgacatgcttcacggactccgtggccttgaaatgtcatagagcttcgtatagcggacatactagaccgttatggtaaaccactatcctgtcgcaaa

SEQ ID NO: 4756 - DNA, 308 bp, Glycine max
  Clone ID: 700559922H1
ctttcttcctttgtaatagaaagcacgcgtttctctctctccctactctcaacgaatatttgtgtacttcctcttttgtgggtagattcaatttaccatgtcgagttcatcggaatactctcaattttccggccagaaaccggcgaggtcgccggagaaatcgagcttctctcagacttgtagcctgttgagtcaatacatcaaggagaagggtagcttcggagatcttaccctcggaatgactcatgtgggtcacctgagacatcttgtcaatctgctacaaccatgaacttgtttcctaccaagga

SEQ ID NO: 4757 - DNA, 306 bp, Glycine max
  Clone ID: 700559923H1
gtttctctgtcttcattttagtttttacggctagaagaatgtccagctcatcggaatatttggtattttccggccaccacccggcgaactctccggcggaaaagtccactttctctcagacttgtagtctattgagccaatacatcaaggaaaagggtaccttcggagaccttaccctcgggatgacttgcactgccgaaacaaacggttcccctgagacatcgtgtcactctgcaacaacctggagttgtttcccacgatcatcacgcaacggaacccaatactgtggatttcctatctccccag

SEQ ID NO: 4758 - DNA, 307 bp, Glycine max
  Clone ID: 700559925H1
ataccacacaagacaaagcgtggggaagctgctcttgctcgtttgaaggtttatgaaggaatccctcctccatatgacaagaccaagagaatggttgttcctgatgctctcaaggtgttgaggcttcagaaaggacacaagtactgtgtattgggcaggttgtcacctgaagttggatggagctactatgataccattagggagctggagaagaagagaaaggagaaggcagagttggtttatcgagaaagaaacaactcaacaattaagggtgaaagctgaaaaggttgctgaagagaagctcggt

SEQ ID NO: 4759 - DNA, 307 bp, Glycine max
  unsure (1)..(307): unsure at all n locations; Clone ID: 700559926H1
ctccaccaacacaaaagcacttgcaaactagttttgttttgggaacatcatcacattacattagattggtggtaatggcagcgtcactacaagcagcagctactttcatgcaacccaccaagttgagcaggagcaacactttgcagcaaaagtctactcagtccatttccaaggcttttggtttggaacctgttggagctaaaaaggtcacatgctcccttcaggctgatcttaaggacttgctcacaagtgtgttgatgctaccaaaattgcaggattcgcncttgccacctctgccctcgttgtc

SEQ ID NO: 4760 - DNA, 308 bp, Glycine max
  unsure (1)..(308): unsure at all n locations; Clone ID: 700559927H1
gtgcggcgcgtggatgccgccgaggaacagtggccgaaccgccagaacgtcgtcgcatgcgcgtgcgtctgcaagcgttggcgtgacatncacgcgcgaggtcgtgcgcgtgccctcccacaccgggaaaataaccttccctgcgtgccttaagcagccaggaccacgtgacgttccccaccaatgtcttataaagcggaacaagaaaacttcaactttttatttatatcttgcccttacaccacattcacagataaagggaagtttctgctagcagctaggagatataggtgtggtatcataccgag

SEQ ID NO: 4761 - DNA, 303 bp, Glycine max
  unsure (1)..(303): unsure at all n locations; Clone ID: 700559929H1
caactacagtctacagctgatgcattggtgatatcagttatcaccacaatattgtccagaatttgagtaaactaatgagcatgagatgctgcacaaatgctgaacttctttaaatcttctgttgatacagaaaatatatacatagcttttttctttctatctctcttttgtccacctttgaagaggaaattactaaactgctccattccatgcacagtacactcgtatggtttatcatacttttatatgataganagattagaaacacgttgtgctctaaatacacattgtaatagccagaag

SEQ ID NO: 4762 - DNA, 128 bp, Glycine max
  unsure (1)..(128): unsure at all n locations; Clone ID: 700559930H1
acttcccaaaaaatatacagcnctatggaacaccaaaaagaggagcaactagaaccagtgagtcctgtgggacaatacttcaacagctctgtgctatgcatatacatcattggagttttagantccgc

SEQ ID NO: 4763 - DNA, 106 bp, Glycine max
  unsure (1)..(106): unsure at all n locations; Clone ID: 700559931H1
cntcaacaggantcttctggcctggnaaggacaacttctgcatacatcactgtagctgactttncgtataggtacccttnntncgngtgttgcnggatatgtacng

SEQ ID NO: 4764 - DNA, 317 bp, Glycine max
  unsure (1)..(317): unsure at all n locations; Clone ID: 700559932H1
ttccanataggatggttgttgcagtcaaattatttaatttggaccttgaattgggatcaaggagctttngtgtagaatgtgaagtaatgcggaatctgcgacaccgaaatctcatcaagatcatttgtagttgctcaaattctgattacaagcttttagtaatggaattcatgtccaatggcaaccttgaaagatggttgtattctcataactattatttagacttcttgcaaaggctaaatataatgataatgtggcttctgcattggaatatatgcatcatggtgctcgccaactgtggttcattgtgatgtaaa

SEQ ID NO: 4765 - DNA, 107 bp, Glycine max
  unsure (1)..(107): unsure at all n locations; Clone ID: 700559933H1
ttagantctactcttacctcctttctctatatccctccctcnttagtctttctgaaantccaccaaccaacaattntgncttaactgtagaagtagantggnggggt

SEQ ID NO: 4766 - DNA, 308 bp, Glycine max
  unsure (1)..(308): unsure at all n locations; Clone ID: 700559934H1
gaaagaaaggcagcgatggaagaagacttcgacatccccggcggcgaggaaatggatctcggcgaagacgaggttcggcgaggagagggagatcggctctggcggcctcaagaagaagctcctcaaggaaggtcaaggctgggaaacccccgaagtcggtgacgaatccaagttcattacacggggactttgctcgacgggactaagttcgattcgagccgcgacagggattctcccttcagcttcagctcggacaagggcaatattaaaggatgggatgnaggnttanaccntaaaacgggaatntt

SEQ ID NO: 4767 - DNA, 139 bp, Glycine max
  unsure (1)..(139): unsure at all n locations; Clone ID: 700559935H1
atggctgcagtgttctgggctttggctttggtaagcctctgtggccagctaccttccaatgcccaagcacctgcaactgcgnncggcaaactcaccacctacaaccccagctgcaacatcacatcttcnggnangcnna

SEQ ID NO: 4768 - DNA, 100 bp, Glycine max
  unsure (1)..(100): unsure at all n locations; Clone ID: 700559936H1
ttcncttctcttctnacccccacactcccatntcacacancccgcgcatgcaagcaatgtgtctnaccattccctgccannntctncaagcgcgnggncc

SEQ ID NO: 4769 - DNA, 296 bp, Glycine max
  unsure (1)..(296): unsure at all n locations; Clone ID: 700559937H1
ggtcgagttatctctcatcgtctcgatctgccgtcagagaaatgtttagatatgcacttaacatgaaattgattgagtgcctacgtaagcatttctttgacaatatatagattaatattgttgtgtttttcatttttttatttatagagggaggttgttcatgtgctactgtacgtgtctaaataatgttgtattgatcttgtattgtgcaccgtcaaattatgaatgggcaagctgttgccttacttgtctctagctgtntgtaccatgaaacatgtctattgatcatatgtcca

SEQ ID NO: 4770 - DNA, 286 bp, Glycine max
  unsure (1)..(286): unsure at all n locations; Clone ID: 700559938H1
gctcnnnccatcaccctttctntcattctgttgggaaatggnagtcacactttcagcgtgcaagtccattagctcgccttctgttcccgnccgcagctttatttgcggggaaagcaggaactaagagtncgcaatgcagttttttagctggagcaaacaangtgaggtttcctaggcaagtcggtcaagttagccacgttcgcaaacagcgccaaacgcgnactgtggtgctctccacgcgacttgcagcggtgacaagatcctgatcgcgnatagaggcgagatt

SEQ ID NO: 4771 - DNA, 295 bp, Glycine max
  unsure (1)..(295): unsure at all n locations; Clone ID: 700559939H1
ttcaacgactccgttccgttctctttcttcnaccttcgaaaccctaataagcttctgcacttccttctgattccacttttgcttcaactnggaagatactgtagggcctgggccacctaatgatgagatatccaatttctacataagttgccattgatacttttttaatcaaatggattcagtgcctgctgatgtgtctaattcacatactattaatgacccgtcgaagtcatccggctaaagagactgacagacaagcttctgcttctgtagcctccgggcaagataatctcca

SEQ ID NO: 4772 - DNA, 255 bp, Glycine max
  unsure (1)..(255): unsure at all n locations; Clone ID: 700559940H1
ctaaccctaatcctccatcatcgattcgattctcttgctctttgttatttccttctttggtgaacaaagcaaaacaattgcatcgatgaatcgggcgtcacagctttcgtgataatgatcttggcgctgcgaatcgattgcatgggtttggagaatgtcggagcttcgtagtggaccgcgacgacgtcgtctccgattgctcgtaaaagctctgaaccaccgtctcncgcggggagatacgtcaagactcgcgct

SEQ ID NO: 4773 - DNA, 306 bp, Glycine max
  Clone ID: 700559941H1
cgcgagttcaaggccaagttcgccaagacctacgccaccaaggaggagcacgatcatcgcttcggcgtcttcaagtccaacctgccgcagagccaggctgcacgccaagctcgacccctccgccgtccacggcgtcaccaaattctccgatctaactccggccgagttccgccgccagttcctcggcctcaagccgctccgcttcccggcgtacgcccagaaggcgcccatcctccccaccaagatctccccaaggatttcgattggcgagacaaaggagccgtcactaagtcaaggaccaagggc

SEQ ID NO: 4774 - DNA, 304 bp, Glycine max
  unsure (1)..(304): unsure at all n locations; Clone ID: 700559942H1
gatcatacgatttcgttttgcctaatctaaggnacaaattcanacaaacaaggtcactcctnnnnnnnnnnnnnnnnnnnnnnnnttctctgtcaagtgctgtctatcactcgttgttgatttcattccaacaacgtcaatttcacatttccttgtcttgttgtgatcactctttagtatttagcatacctgcaaagttgtactcttttttnttcctncccnttgttttgagctctcagatactcagcaatcacaatctctgttgtatcaggtttntcgatttggctgtgacccttatgaatca

SEQ ID NO: 4775 - DNA, 302 bp, Glycine max
  unsure (1)..(302): unsure at all n locations; Clone ID: 700559943H1
attttggcacctttgcctattgggttcgcggtgttcttggttcacttggcaaccatccctatcaccggcactggtatcaaccctgctcgtagtcttggtgctgctatcatcttcaacaaggaccttggttgggatgatcactggatcttctgggtgggaccttcattggtgctgcacttgcagcactctaccaacaggtcgtaatcagggccattcccttcaagtccaagtgattcaanaaaccgttcatgcttaatcaagttgggaacaacaaaaaanatcgaaacccagnnncattgttc

SEQ ID NO: 4776 - DNA, 115 bp, Glycine max
  unsure (1)..(115): unsure at all n locations; Clone ID: 700559944H1
cttctcagccgggtgtaganttaggtttgccagccacaccanctaggcattgctatagcnanaggggnagacagaatttncaaaccagcatntcaacagaaggggnangngcnag

SEQ ID NO: 4777 - DNA, 305 bp, Glycine max
  unsure (1)..(305): unsure at all n locations; Clone ID: 700559945H1
ggagagataggaattggttgtgaaaaaacagangcactttgtttccaagtaaaaggaatcttcagctgccatgtttcatcgctggagcaattctcatcaacaagatcagggaagcagcgagctttgtactgaatccaagattaaggagctgaagggtgctattggacccttatctggacgcagtttgatgtattgcactgattcatgttttaagagatattggaagctcgaaactggaacgagacaagtccaagaagatgttggaggagacactaagtggagatcaacctataagccagaagaaa

SEQ ID NO: 4778 - DNA, 308 bp, Glycine max
  Clone ID: 700559947H1
gagaaggatccatcaaagattgggagactttcaaatgaagcccttgctcctcttgtggaagttgcattgaaactttcgaagatggaagaattcactggtcgatccgctccaacagtcattacatgaacacatacaggtggaaggtggttagatcctgaagtttctcccagtcatttcttctttgttcagtttcttacggatggccgaacactagtgttggttgtttgcagcctttgctatgggcatgagtggatttgatcagttacttatcaaaatttgatgtgctgaataagttgcaactgccgagt

SEQ ID NO: 4779 - DNA, 308 bp, Glycine max
  unsure (1)..(308): unsure at all n locations; Clone ID: 700559948H1
atttaccaccagcttctgaagttatattgctcagacatgactttatatcccattgtttacactgcantcattttgttcataatccatgaggttctttgctgtttccttgcttttattcattttaatgtacttgctttgtctattttttttcctttctatcctttacttctgggatgattgccgtctttacgataaagtgttgggaaaaactgcaaaacagaattgtgtatactcaaagctaagagcgtcaaggactatctctactggaaacagttattcaccgagagccgttcttatagatgatcttt

SEQ ID NO: 4780 - DNA, 138 bp, Glycine max
  unsure (1)..(138): unsure at all n locations; Clone ID: 700559950H1
caccactcgttcccgttactccccagcaaccataattatttttttttgacaagcagctcaagaaaaatctgcaaagaattccacaagaggaggaaatgcaacttacttgttgatataaacttcagacncagcgagttt

SEQ ID NO: 4781 - DNA, 306 bp, Glycine max
  unsure (1)..(306): unsure at all n locations; Clone ID: 700559951H1
aaggatttgaagcgtggttatgttgcctcaaactcaaaggatgaccctgcaaaggaggctgctaacttcacagcccaagtcatcatcatgaaccaccctggtcagattggaaatggctatgcccctgtcctcgactgccacacttctcacattgctgtcaagtttgctgaactcatgaccaagattgacaggcgatccggcaaagagcttgagaaggagcccaagtttttgaagaacggtgtgctggttttgttaagatgattccaaccaaacccatggttgttganactttctccgagtatcctc

SEQ ID NO: 4782 - DNA, 147 bp, Glycine max
  unsure (1)..(147): unsure at all n locations; Clone ID: 700559952H1
gttattgcctcaagggtcntcaacancaangtttccggtggaancttcaagattnttgctgtagaanatcaagaangagtaccaagagacncagcagaccgacaaggacagatggaacggtcttncctatgatatctcagacgngaa

SEQ ID NO: 4783 - DNA, 302 bp, Glycine max
  unsure (1)..(302): unsure at all n locations; Clone ID: 700559953H1
gagacagaggcacagagagaaaatggtttcggggtcagggatctgtgccaagagggtaattgtggacgcacgacaccacatgctggggaggctggcatcgatcgtggcgnaagaacttctgaatgggcagaaggtggtggtggtacgctgcgaggagatttgcatctccggtgggctcgtcangcanaagatgaagtacttgcgtntcctccgcaagcgcatgaacaccaagccctccacggccccatccatttccgtgcacccggcaagatcttctggcgcaccgttcgtgggatgatacc

SEQ ID NO: 4784 - DNA, 297 bp, Glycine max
  unsure (1)..(297): unsure at all n locations; Clone ID: 700559954H1
gtagangccaanaaccctnacagttggtgttgtnntggatngtgataatggccttaanatacgtaattggggttactatgaacccgccacgtcgtttaagagccacctggggctgcaactgatgtcatccatgccggaaaaacctctaattggagggcgcaatgctgcggttttagctggtactaatggggcatttcaccatagggacattggtggtntgccccaagctacatactatggaatacatgagggangctggattagtcagagagcncgcccntggctatgatnccnacc

SEQ ID NO: 4785 - DNA, 300 bp, Glycine max
  unsure (1)..(300): unsure at all n locations; Clone ID: 700559955H1
caaggcagaaagcaagctcatcctagagttttaaaaatggcagcagcctcctccatggctctctcttccccatgccttggctggcaaggccgtgaagctgggcccatcagcccccgaagtcgggagggtcagcatgaggaagaccgtcaccaagcaggcctcctccggaagcccatggtacggcccagaccgcgtcaagtacttgggcccattctctggcgagcccccgtcctacctctggcgagttcccaggtgactacggctggganatgctgggtttcggccgacccagaaaccttc

SEQ ID NO: 4786 - DNA, 172 bp, Glycine max
  unsure (1)..(172): unsure at all n locations; Clone ID: 700559958H1
ggtcaccatctagactgcaatcatggctgatggaccacagcatccatcagttgttcagaagctagctggacagtacttaccnggtgtaccaggcttagccccaactttaactctangaattattctgcaactggtncttacgtcaatggcggnatgcactcgcctgggttgg

SEQ ID NO: 4787 - DNA, 147 bp, Glycine max
  unsure (1)..(147): unsure at all n locations; Clone ID: 700559959H1
ctcgagccctaacagccacngcatggcttctctctcttgctncgccaacgagttgacgccactcttcaanganaccgangncgncaactacctntgcgcncaattcgattccantnctngacagctcagngtancaacctacgccgt

SEQ ID NO: 4788 - DNA, 130 bp, Glycine max
  unsure (1)..(130): unsure at all n locations; Clone ID: 700559960H1
cttgcatcaaaggtggatgcaatcaaggatagccttgataatgangaagaaaaagttggagctgatcntgtgaaaagagctcanagttaccctttgaaattaattgccaagaatggctggtgtcaangga

SEQ ID NO: 4789 - DNA, 85 bp, Glycine max
  unsure (1)..(85): unsure at all n locations; Clone ID: 700559961H1
ggcgacacagagancnctcagagnnccgaaggcngattncaagntcgaagttcagacattgcganttcccnncaccggttgtcag

SEQ ID NO: 4790 - DNA, 305 bp, Glycine max
  unsure (1)..(305): unsure at all n locations; Clone ID: 700559963H1
ctcttcttctcttgcggctagggttttagcgcanttcttctagatttaaggaagatgggtaaggaaaaggttcacatcagtattgtggtcattggccatgtcgactctgggaaatccactaccactggtcacctgatttacaagcttggaggcattgacaagcgtgttattgagaggtttgagaaggaagctgctgagatgaacaagaggtctttcaagtatgcctgggtgctggacaaactaggctgagcgtgaaagaggaatcaccatgatatgctttgtggaagtttgaaacaacaaatatt

SEQ ID NO: 4791 - DNA, 308 bp, Glycine max
  Clone ID: 700559964H1
tgcgaattgaacctcaaaatcagtctctaatatttttctcactgtcttgtctctccagagaactgtatagagagagatggcagctgcaacatctggtgctgtgttaaatgggttgggatcttccttcttgagtggaggaaacaggagccaaacccttctggccactgctattggaggcaaagttggtgctgctgctgttactgttagtcctagaagactcattgtggtagctgctgctgcaccaaaagtcatggctcccggtgtcagaggtggtggcaactcgtcgacccagaaggcttgatggatcg

SEQ ID NO: 4792 - DNA, 149 bp, Glycine max
  unsure (1)..(149): unsure at all n locations; Clone ID: 700559965H1
gatttccttatcctaacactctnatctggtctctatgtctcgaatcttctccgcatggaacaagaagaagctgcaccttcatctcaacttaatccccactattttttcttcttnccacacnnaatacgatnngggcgctgccgccaata

SEQ ID NO: 4793 - DNA, 304 bp, Glycine max
  unsure (1)..(304): unsure at all n locations; Clone ID: 700559966H1
caacaattcactaagctaaaatcacttcatcatggcttcctcgtgtgcttcctnctgccattgcagctgttgccatctccacaccaagttcccagaagaatggatcactcttgggaagcacaaaagcttcttttcttagtgggaggaaactgaaggtgaacaactttacagcaccagttggagcacgatccagcactacagtttgcgcagttggtgagcctgatangcctctgtggttcccagcagcacccctcctccatggctagatggcngtttgccagagatttggcttgancnctagnct

SEQ ID NO: 4794 - DNA, 291 bp, Glycine max
  Clone ID: 700559967H1
ctcggtgggtattatgatgcattttgtggggtagttcagtactcaaatctttacggaaccgccgtaggatacacaattgcagcttctattagcatgatggcaataaaaaggtccaactgtttccattcttcaggcggaaaaagtccatgtcaggtttcaagcaacccatacatgatcggttttggcataatccaaattttattttctcaaattccagattttcatgaaatggtggctctccatagttgcagcaatcatgtctttgtctatccacaatgggctcgctcttgg

SEQ ID NO: 4795 - DNA, 297 bp, Glycine max
  unsure (1)..(297): unsure at all n locations; Clone ID: 700559968H1
gagattatgtcaccggnctccctaaagaatccgacatgaacattgttgaaggcaccataatattgaaggttccagaatgntccaatgatgtccttctaaaaaatctctacttgtcatgtgatccatacatgcgactcctcatggccaaggaccgttcttncggaganggctccttcacccttgcctctccattganaggatatggtgtgtctcaagtgctggaatctggacgtccagaacaagaaaggtgattagtgtgggggatactaaagggaagagtatagcttggnccctcac

SEQ ID NO: 4796 - DNA, 295 bp, Glycine max
  unsure (1)..(295): unsure at all n locations; Clone ID: 700559969H1
cgtgagggggcagtactatcagctcctgccctttgggagcgggagaagaagctgccccggagcntcgctagcgttgcttgtcatgcaagcaacgctagcgagtttgatccagtgcttcgactggancntaatgatggtaaaaaccatcatgttgacatgtctgaggaagggagggtgactgtgtttttggccaagccactcaagtgcaagcctgnntccgcgtttcactaccgttctgcctgaagatgtgaaggaaggtttctctagttgtgtgngcttacctactctatattnt

SEQ ID NO: 4797 - DNA, 299 bp, Glycine max
  Clone ID: 700559971H1
gtcggcttcataagtgctatgatttcaaacatttccttcacgtaccgaagcatctattcaaagaaagccatgactgatatggacagtaccaatatctatgcctacatttccatcattgctctaattgtgtgtataccacctgccgtaattttggaagggcccacactgttgaagcacggcttcaatgatgctattgctaaagtaggtttggtcaagttcgtctcagatctcttctggttggtatgttttaccatctctacaaccaggtggctaccaacacactggagagagtggctcct

SEQ ID NO: 4798 - DNA, 297 bp, Glycine max
  unsure (1)..(297): unsure at all n locations; Clone ID: 700559972H1
gcatgaggaggagagtgacgcggatgaggaggagacggagtcgtcgaggcggatggttgttaatggagagggccatcgggagaatggtcttggggttgcgccagtggagggggacgatgttgaggaggaagattgatnnnnnnnnnnnnnnnnnnnnnnnnntggtggaggttcatgagattgaggatagtgatgatgaggatggagtggaggagtatggatgaggacgatgattgaggacgacgatgaggaagaagaggnggatnacgacgagggtgattttgtggagcctgagag

SEQ ID NO: 4799 - DNA, 120 bp, Glycine max
  unsure (1)..(120): unsure at all n locations; Clone ID: 700559973H1
atgncatnnnaacncttggnanngcgatcnacancgttggtaactggattcgagggactggacaggncattgatcgtctcggtnnnctcctccaaggcggttactacgtccaagggcagt

SEQ ID NO: 4800 - DNA, 299 bp, Glycine max
  Clone ID: 700559975H1
ctaatccctcactcttgttcttcagtctcctcctattatccgccaccgtagccgccgccgaacggatcgacgatgaagacgaccttctgatccgtcaagtggtgccggatgcggaggaccaccacctgctcaacgcggagcaccacttctccgccttcaagacaaagttcggcaagacctacgccacgcaggaggagcacgaccaccgcttccgtatcttcaagaacaacttgctcgcgccaagtcacaccagaattggatccctccgccgtccaggcgtcaccaggttctccgatctc

SEQ ID NO: 4801 - DNA, 299 bp, Glycine max
  unsure (1)..(299): unsure at all n locations; Clone ID: 700559976H1
acttaattacattcagaatgagctggattattgtggagaagaaccatctatgtcacctagagcaccactgcaacaccagtcacaagcagcattgcatgtccctagttttccagtcacttcagcatctnctggtcaaacaatagctgcacaaggactccgctcggaccactgtgaaaatcantcaaagaattctgtgttttcaaatgctttgtcaagtccagtacgtcgaagccttcacattatcaaattggtgagggangagctacaccaatggtctctccatggggatggaaaccgga

SEQ ID NO: 4802 - DNA, 301 bp, Glycine max
  unsure (1)..(301): unsure at all n locations; Clone ID: 700559977H1
gtgccttatcgctgtggttttcatcgtcttccttctcttatatttctnttttnttttngttcttcgccgcacgccgaaacaatggccggaaaagganagggtcctgcnatcggaatcgatctcggaaccacctactcttgtgtcggtgtgtggcaacatgacnganttnaaatcatcgccaacgacnaagggaacagaacgacgccgtcttacgtcgggttcactgataccgngcgttcatcggtnntgcggcnaataaccaatcgccntgaaccccatcaanaccgtcttcgatgccaag

SEQ ID NO: 4803 - DNA, 207 bp, Glycine max
  unsure (1)..(207): unsure at all n locations; Clone ID: 700559978H1
cttctgcagagggatcagagtggaccaattgaggttataggttgctcagatatgttttcaggaaccaaacagctggttaaggatattatgaaggcaataaaagttggcattgaacctatccccattcagagtggattaggaggtgcatattattttaggaacagcaatggtgaaaatgttgctattgngccncccactgggngnccc

SEQ ID NO: 4804 - DNA, 108 bp, Glycine max
  unsure (1)..(108): unsure at all n locations; Clone ID: 700559979H1
gaattgggttctcttcctaaccctggccatcagcctctgtgtctccggcgcattcnaaatccaaaccgaaaccttggtncctncagatcctacntgagnnacanatnc

SEQ ID NO: 4805 - DNA, 92 bp, Glycine max
  unsure (1)..(92): unsure at all n locations; Clone ID: 700559982H1
cttctggnagtttagacaccgcctgcaagtgcaaactccttcaccaanttcaccttctccacacancctannatcgagnctctntgcacnga

SEQ ID NO: 4806 - DNA, 299 bp, Glycine max
  Clone ID: 700559983H1
aattgaagttgaagtcttgcccttctctcttcaactccaaacacaagacatcatcatccatggctgcctccgtctccactgtcggagctgtcaacagagctcttttgaacctgaatgggtctggacctggggtttcagctcccagttcatccttctttgggagcagcttgaagaaggttattggctcaagggtccccaacacaaagatttcctctggaagcttcaagattgttgctagaagagaagaaagagattgaagagacccagcagaccgacaaggacagatggaaggtcttgcc

SEQ ID NO: 4807 - DNA, 297 bp, Glycine max
  unsure (1)..(297): unsure at all n locations; Clone ID: 700559984H1
ctagaccattccttgaagcaatgaagcaaagatataatgaggaggatgctgaagagagagcttcagaactgtgttncattgtgggaagaatatctaaaggacccagattggcatccattcaaagttatcatggttgaaggaaaagaaaaggaaattattagagatgacgatgaaaagctgaatgggttgaaaaatgacttgggtgaaggggcatataaagcagtggtggaagcttttggaaataaatgaacatatcctagtggacgatacttaacctcagtattatggactataaac

SEQ ID NO: 4808 - DNA, 278 bp, Glycine max
  unsure (1)..(278): unsure at all n locations; Clone ID: 700559986H1
aagctgttgacctnnatctggagcaaaacaatcttcaaatggaggttgaggtggagaccaggactcttgaggaagtggaagaagttttacattattcatctcaaacaaagacttctttgactcgaataatgttggacaatatggttgtacctctaccaaatggggatgtggacatatctatgctaaaagaagctgtgcagttgataaatgggagtatgagactgaggcatcaggcaatgtcacactagatactgtncataaantggggcaaagcggag

SEQ ID NO: 4809 - DNA, 295 bp, Glycine max
  Clone ID: 700559987H1
ccgcaggatgtgcttgggcatttggtatgaacatttttgacttggttgcatggcggaaggcaaacgtgaccacaagatatcactattggcaagagcagaatgctgatgggactctctggaagctggggacacttcctcctgctcttctttgtttttatggtttgacagagccacttgacagaagatggcatgttttaggattgggttatgacctaaatattgacaaccgcccattgaaagtgcagcagttattcacttcaatgggaacatgaagccatggttgaagttagctata

SEQ ID NO: 4810 - DNA, 295 bp, Glycine max
  Clone ID: 700559988H1
aattactttgttttcagcctgtcttgtggagcattaattgcagtaacttttgtggtatggattgaagacaacaagggatggaagtggggtttagtggtctcaactgcatcaatacttctctccattccagtttttcttcttggctctcacaagtacaggaccaagattccagcaggaagccccatcacatccatgttcaaggttcttgttgcagcaatttgcaacaactgcagccaagaattcaagcaatgctgtcataagcatgactacaggtccatctcatgcaactgaaaga

SEQ ID NO: 4811 - DNA, 206 bp, Glycine max
  unsure (1)..(206): unsure at all n locations; Clone ID: 700559989H1
aaggtattgaaattggacaaatggaagaacacctataacgtgttatcatgtggcttttattaggcaggctacctagtataccaaaagcaccactgtgcttgtactnaataaattcctgcttatatatactggccattatgttatatataaaaatcatatgcatgccgtttatataaataaagctatgttgaatantatatctattt

SEQ ID NO: 4812 - DNA, 118 bp, Glycine max
  unsure (1)..(118): unsure at all n locations; Clone ID: 700559990H1
cagaagaacaagtagttgagaactangaaggagaagcaaatggcttcctncaatgatctacttccccanctgttaccactgtgcaaccgtntccggtgccggcatggttntccccatt

SEQ ID NO: 4813 - DNA, 297 bp, Glycine max
  unsure (1)..(297): unsure at all n locations; Clone ID: 700559991H1
aaaagaaggaaaccagnttagagtagtagtttgtgttgcgattgangacgacgataacgacaacgacgaagcatnatgtcttccggcggnggcggaggcggagcaaagcngttcttctgccacgtgtgcngtcnnaggatcacgtgctccgatgagtcggaacccttctgcccgatctgtatggaaagtttcgtngaagaatgcaaccctaanaaccctaaccctaatcttttacnggnnatgatgaatcttctgattccgaaatctnctnctccctgctccctctctncactcntc

SEQ ID NO: 4814 - DNA, 185 bp, Glycine max
  unsure (1)..(185): unsure at all n locations; Clone ID: 700559993H1
tgaagccatcgatgctcagatctctccactccgncgccacccgnggcgcctctcatctcttccgccgtgggtacgcctccgagccggtgccggagcgcaaggtagccgttctcggcgccgccggcgggatngggcagcctctctcccttctcagaagctccntcctcgnntngagcctctcnttt

SEQ ID NO: 4815 - DNA, 303 bp, Glycine max
  unsure (1)..(303): unsure at all n locations; Clone ID: 700559994H1
caacaacagcaacaacgatgccttcatgcgcaaccaaaacgccgccgttcaggcccgcaccaaagcgcagaaccgctccaacgtccttcagctcaaactgattggacagagtcacccaaccggtctcacagcgaacctgttgangctctttcgagcctaggcctccgttggagnccaagccacctcnggagaaacgaanatgnccaccgttatccgggatggcacatttgtgagcaagtgcngagcctggcgaactngantacgctccacctgtcccagannctgagactcctgcacnaaaaa

SEQ ID NO: 4816 - DNA, 301 bp, Glycine max
  unsure (1)..(301): unsure at all n locations; Clone ID: 700559995H1
ttcttctcttatcagaaacgcgcgttgctcggataaggttgtgctgcgccgactcactggtactttgcttaatatggcggctgagaagtcaaacattgcanaagatgtgactganttaattggcaaaactccattggtatatctcaaccacatcgtggatggttgtgttgccaaagttgctgccaagcttgaaatgatggaaccttgctccagngtcaaanacagggataggatatagcgattgtagacgctgaggagataggatcatcacaccgggtnaaatgtccncatgaacctacca

SEQ ID NO: 4817 - DNA, 235 bp, Glycine max
  unsure (1)..(235): unsure at all n locations; Clone ID: 700559996H1
attttcttggtaatatcgtggtgtgactcgtgtctgcttctttttaaaacaatatttttggacttgttcctgcaacttgagagatgcacttgtcctttatcaacagatctatatgtcgccgtattatgtcaaacagtgtagatttgtattatacttgggtaatatacnanttcaatgttgccttgaggatatttcagtaatctatttncatttagagcggnaaaanaaanaaaaa

SEQ ID NO: 4818 - DNA, 168 bp, Glycine max
  Clone ID: 700560001H1
cctttgtattatggcagagaatgcaacttgcggtaaaactacttatgttcactgtaaagctggtcgggggaggagtacaacaattgtgctttgttatctggttgaatacaaacacatgacgcctgctactgccctggaatatgttcggtctcgaagacctagagtgct

SEQ ID NO: 4819 - DNA, 290 bp, Glycine max
  unsure (1)..(290): unsure at all n locations; Clone ID: 700560002H1
cactaattcaccactttccacacncnacngnatagggaactcaaagctttttgacagtttgagcatttcagacaaacatnggggatgatggaaagaagattagtgncgagggggggttagtgaaggttgagcccaaaacccagcaatggtttcacctcaaaagtggttgatttgttggagaaattggtggtgaagttcttgtatgattcttcactgccccatcactacctcactggtaattttgctcccgtgagtgagaccctcnanccagggncttcnggaganngggt

SEQ ID NO: 4820 - DNA, 286 bp, Glycine max
  Clone ID: 700560004H1
aatggcttgatggatcgctaccaggtgactatggttttgatccactaggccttgggaaggacccagcattcctcaaatggtacagagaagctgagctcattcatgggaggtgggcaatggctgcagttctaggaatctttgtggggcaggcatggagtggagtgccatggtttgaggctggagctgacccaaatgcaattgctcctttctcctttggtactcttctgggaacccagttgatcctcatggggtgggttgagagcaagagatgggtggatttcttcaa

SEQ ID NO: 4821 - DNA, 176 bp, Glycine max
  unsure (1)..(176): unsure at all n locations; Clone ID: 700560005H1
gccatggctacattcgagaggatgttatcggaggggattcggcctgataccgttacttggaacacgctgatcaattgtccttgtaagtccgggcgccacaatatggccgaggagttgttcggcgaaatgcagcagaggggatactcgccttgcattactactnataacattatgat

SEQ ID NO: 4822 - DNA, 178 bp, Glycine max
  Clone ID: 700560006H1
gcagagttgcaaaacgaagatgaagattcagaaaaagagtatgaaggagatgaaggatctgcagctgagaaggaaagtgacgatgagggttccaaactgcgtaaatctgctctggaaagattggagaaagctagtgaagagtcacttcttagccagggtttgaaggtttttgataact

SEQ ID NO: 4823 - DNA, 145 bp, Glycine max
  unsure (1)..(145): unsure at all n locations; Clone ID: 700560008H1
gcaganttcaagcagggaanagttgaatacagggcagacaaaactggaatcgtgcacttaccttttggaaaagctgactttccagaagaggatcttcttgtaaacttgcttgctgcagtganatcagtagaggcaaacaancctg

SEQ ID NO: 4824 - DNA, 147 bp, Glycine max
  unsure (1)..(147): unsure at all n locations; Clone ID: 700560009H1
gaagacgaagaagcgcaaggcttcagatttagaacaagaggccatgccccccgccgcttacaacaacgatggggacgacgancccagctccgacctcgtccaacccgaacctgcttccagagaagacgacaacaagantaagaagaa

SEQ ID NO: 4825 - DNA, 170 bp, Glycine max
  unsure (1)..(170): unsure at all n locations; Clone ID: 700560010H1
gtggaatccttgtttaggaggtacactgaacatggaatgagtgaagatttggcctataacaacactgtncgagtccattacaggaactatatctaaaataatctcgactaagggtatgttggctgtatacaatgctttatctgaagatgaaaagagggaatttgagaaac

SEQ ID NO: 4826 - DNA, 128 bp, Glycine max
  unsure (1)..(128): unsure at all n locations; Clone ID: 700560011H1
ttctcggaagagaggtagagaagacccgggtgttggcaaaacacaatcactgcagcttctaatgttatcgatcaattctctttacaatctcagcctccgcaacttgttccactctcttnggtccaana

SEQ ID NO: 4827 - DNA, 172 bp, Glycine max
  unsure (1)..(172): unsure at all n locations; Clone ID: 700560012H1
ggcgcaccatcttcaccttgaagtcaacgatcatggcaaccattaacctttcttccgctactacgtctctcntccaatccaaacaccgaangaaacgcattccacgcctccctacaatngccagaataacaaaccacatcgaaggaactcatcttaactcccccagcgnntt

SEQ ID NO: 4828 - DNA, 185 bp, Glycine max
  unsure (1)..(185): unsure at all n locations; Clone ID: 700560013H1
gcattccgtggagatctagtgctgccaaacctcgctgaaaattagggtttcgtttcggaggtagacgaagatgttcggaagggcaccgaagaaaagcgacagcaccaggtactacgaaatcctcggcgtttcgaagaacgcttcgccggatgatttaaagaaggcttacaagaaagccgccntta

SEQ ID NO: 4829 - DNA, 149 bp, Glycine max
  unsure (1)..(149): unsure at all n locations; Clone ID: 700560014H1
gtgagtttgttgatcgagataactagaaacagtgtgatgaaaatgaaggtccttgttttcttcgttgctacaattttggtagcatggcaatgccatgcgtacgatatgttccctctccgaatgaacactggctatggtncccgtcnccc

SEQ ID NO: 4830 - DNA, 163 bp, Glycine max
  unsure (1)..(163): unsure at all n locations; Clone ID: 700560015H1
ggttcagatatcagtttcggtggtttcactctatcgccacccagttccgatggctctcctcgccgtcacttcgcgcgctcccttcctcttctccncaaaccctaaaccactttctcnatcctctttctactccnacntntctctctctnctcgntnnnggagg

SEQ ID NO: 4831 - DNA, 172 bp, Glycine max
  Clone ID: 700560016H1
aagacaaatggcaacaagcgaagaagtggttgcggcggcgccggaggagccgcgctggaggcagggctgaagcacaaactggagagaaaatggacgttttggtgcgacaaccaatccaaacccaaacagggcgctgcttggggtactctcttcgcaaggtctacaccttcga

SEQ ID NO: 4832 - DNA, 174 bp, Glycine max
  unsure (1)..(174): unsure at all n locations; Clone ID: 700560018H1
cattcccagaagaagctcttatgggacatgttttcattcagaatagtatatagtntgatatggggagttattaatcatgattgtcgtgtgttgaattcagaaggtggtagaaagcaagcttttctctttgggaatgcccaagtttaacgtcgaagaagaggttagttgagctag

SEQ ID NO: 4833 - DNA, 288 bp, Glycine max
  unsure (1)..(288): unsure at all n locations; Clone ID: 700560019H1
tgagtgagtgagtccttggtccgaagcaatgcaagangaagaagcatagcagagaagcagcaatgacaagagcaatgctcctggtgttattccctcaagacaacaaagccaagttcaacttcccttctccttctaagtctcttgtctccaaagcacaatccactatctcaatctgcctccttctctttttcacaactctcctcctttttactctntccnccctcccanannacccctcagacccctcccactcaccctcctaaacccaccccccaccacctggctctt

SEQ ID NO: 4834 - DNA, 224 bp, Glycine max
  unsure (1)..(224): unsure at all n locations; Clone ID: 700560020H1
cagcaccacattcacctgagctttttgtgaggattccaaagcatggcttcccttgcagcatccactgctgctgcttccttggcatgtcagaaatgcttggaaaccccatcaacctcagtggtgccacaaggccagctccatctgcctctagccctgcctccttcaagactgtggctcttttctccaaaaagaaggctgcacctccaaaaaaagcngcagntgnt

SEQ ID NO: 4835 - DNA, 286 bp, Glycine max
  unsure (1)..(286): unsure at all n locations; Clone ID: 700560021H1
attttattttttctgatgcttactccttttctattggagttatcaataaaagacattagacatggcaacggggcggggacgggtattgcctccccagtccctgaccccgactcctcaacatatccccgtcgggtattggatattcccgtccccggtttagatatgtannnnnnnnnnnnnnnnnnnttatattaaaaatttgatttaaaaaataattgatacgggaatggatatgggatgagtggtgacatccctgtcctcgaccccaaccttggtttaaaaaatt

SEQ ID NO: 4836 - DNA, 174 bp, Glycine max
  unsure (1)..(174): unsure at all n locations; Clone ID: 700560022H1
ctaggaagttggaagtcatggcagcaacattgatggcagcaacaacaagttctggtactcttaaagcaactcctttcttggccaaggcaagggtgccaatgccaatgctcttagggatgttgtctccatgggaactgggaantncaccatgggcaatgatttgtggnatggacc

SEQ ID NO: 4837 - DNA, 215 bp, Glycine max
  unsure (1)..(215): unsure at all n locations; Clone ID: 700560024H1
ctctcancctcctcttcacacattttctgtgcgctctaacaaacattctcgttcacactttcagattgtgtgaagatggtggcgggtggccgaactgatgttcctcctgccaacaggaagtcagaggttgaccctttnaagcgggtgccatttgaaaaacctccatttagtctcagccaaatcaagaaggtcattccacctnactgttcncaggg

SEQ ID NO: 4838 - DNA, 145 bp, Glycine max
  unsure (1)..(145): unsure at all n locations; Clone ID: 700560025H1
atagtntctctgtgttttgttccgctaaatctccaaagcaatcaagcagagttctttaattagatgcaacctcagcacgagggttaacagattccgaccgtctcaatgaatgttgtgatttgtggtactgttgactccttctttt

SEQ ID NO: 4839 - DNA, 156 bp, Glycine max
  Clone ID: 700560026H1
cttactgtcattgagaagttgaagcaaaagcatctcgagcaagagaaaagggagctacttggtgatgatcaggatggagaagctaatgttgacatgcttaatataattcatcttctacaataaatgctttggacaggcaaagtagtgttgaagtca

SEQ ID NO: 4840 - DNA, 170 bp, Glycine max
  unsure (1)..(170): unsure at all n locations; Clone ID: 700560027H1
gcgaancctgaacctccgctctctctttcttctctctctcttgtccatcgcttccgccaatgtcttcttcgaagagcgtttcgatgacgggtgggaaaatcgatgggttaaatcagattggaaaaaagatgagaacgtggctggggagtggaaccacacctntggtcant

SEQ ID NO: 4841 - DNA, 147 bp, Glycine max
  unsure (1)..(147): unsure at all n locations; Clone ID: 700560029H1
attccaagcgcctcttgatagggtctcccattttcaattccttctcagtttccttttctctgaaaaaagatgttgagggttgcagctaggaggctctcttctctctcctcttcttctccgttgcggccnaatcacgccgcttccgtt

SEQ ID NO: 4842 - DNA, 137 bp, Glycine max
  unsure (1)..(137): unsure at all n locations; Clone ID: 700560030H1
tggatacttcggctaagagtaccgggtcgggtgggaagaagcgtggacccgctnccgtatagaatatttaactggggaatacttcgccggttactgttcctactcttgtgagtatattggagcggcatttgaaggtg

SEQ ID NO: 4843 - DNA, 138 bp, Glycine max
  unsure (1)..(138): unsure at all n locations; Clone ID: 700560031H1
atcaacaccaactccaaacagttggaatcgacgaancgcaaaggcatattgacattgggcatgggncacctcgctgtgtacacccgctacagagtcacactgaaactgtacggaacagattcccataagttaaacgcc

SEQ ID NO: 4844 - DNA, 136 bp, Glycine max
  unsure (1)..(136): unsure at all n locations; Clone ID: 700560032H1
ggcagaaagcaagctcatcctagagttttaaaaatggcagcagcctcnttccatgggctctctcttccccatcttggctggcaaggcgtgaagctgggnccatcagcccccgaagtcgggagggtcagcatgagga

SEQ ID NO: 4845 - DNA, 208 bp, Glycine max
  unsure (1)..(208): unsure at all n locations; Clone ID: 700560034H1
ggcaattgcaggtgcaatagttggagcagnaggaggaggatggatgaatgatgcttatggaaganagaaggcgatctgattgcagatgtgatatttattatgggagcaattgggatggcagctgcaccagacccttatcttctgattctgggacgttttctcgttggtatgggtgtcggggttgcctctgttacctctccagnctana

SEQ ID NO: 4846 - DNA, 279 bp, Glycine max
  unsure (1)..(279): unsure at all n locations; Clone ID: 700560035H1
ccaatatagcccaagccctatacaaccaaaccctaacacacacccatttgattcagtttccatggctagcctcaaggttgcatttttggctgcagtgctctgcatggttgtggtgagtgcacccatggcacatgcagctatcacgtgcgggcaggtgacgaatagcctgatcaattgcatcggttacctccagaacggaggaacgccgccgtcgggatgctgcaacggnatgaagagcctcaatgccgccgccaagaccacgccgaccgccagacgggt

SEQ ID NO: 4847 - DNA, 284 bp, Glycine max
  unsure (1)..(284): unsure at all n locations; Clone ID: 700560036H1
ggctggttcaactgaggtgatggctttgaatttgccttctcccgcccaagtgaagccccttatttttctcttcaaataactccacaaaacttccaggtagcttttctttgangagaaaagatagtgacacaacagtagagagacgagtttattgctctgccgctgcttcaatcaccaccaccagcatggccaggaacagctattcccgagccttctgatttcaagacatgggatgggcaaaaacctatttctgtcttaggatctacgggttcaatggaactcag

SEQ ID NO: 4848 - DNA, 162 bp, Glycine max
  Clone ID: 700560037H1
gaaatctgttgtggagtacttctatgagacatatgggtttgtcattcaacatactcagtggccttgtctgcaagttggcaatacacagagacctaactatttgccaatggaggtttgcaagatagtggaaggtcaaaggtactcaaaaaggcttaatgagag

SEQ ID NO: 4849 - DNA, 187 bp, Glycine max
  unsure (1)..(187): unsure at all n locations; Clone ID: 700560039H1
ctgattttcacacttataatatctttatttcagcattttccaagtcagggantgttgatgccatgttagcttggtactcagcgaagaaggctgccagacttggtcctgatcttcaaatgtttgaatccctcatatcaggctgtgttaattctagaaagtttaagattgctgatagaattttgaagaa

SEQ ID NO: 4850 - DNA, 128 bp, Glycine max
  Clone ID: 700560040H1
ggctaacggtaacggtaacagcggggtgaaggaggtgcattttcgtggagtgagaaagaggccgtgggggagatacgccgcggagatcagagatcccggcaagaagagccgcgtctggctcggaacct

SEQ ID NO: 4851 - DNA, 176 bp, Glycine max
  Clone ID: 700560041H1
tgacactttgagagttcaagtttccttttctttcctacaaatccaaaataatagttttagtttacaaaatggctgtggaactcatggggttcccaaaactagacgaacaaaaggccattcaagaagccgcatcagaaggcctcaagggcatgaaacacctgatccgaacctttcca

SEQ ID NO: 4852 - DNA, 289 bp, Glycine max
  Clone ID: 700560042H1
ctaaacttctgggttgcaaaaatgaattcggacacgacttcctattggtgctacagctgcacgcgctttcgttcacatacaagaacagaacgacgtcgtttgcccgcgctgccacggcggcttcgtcgaaaaggtcaccgccccccaatcgtcaaggcaaggcttccgccgccgacgccgcaacgccgggaaccactcggcgttcaacccggtgatcgtgctccgcggaccgggagaggacgaggagagcagctttgagttatactacgacggcttcgacggcgagggg

SEQ ID NO: 4853 - DNA, 142 bp, Glycine max
  Clone ID: 700560043H1
gtgcagggaagatcatccaagtctactaaggttggagatattatgactgaagagaacaaacttatcacagtcaccccgataccaaagttctgcaggctatgcaactgattctattgtcagtcatcagttgcatagcctgcag

SEQ ID NO: 4854 - DNA, 115 bp, Glycine max
  unsure (1)..(115): unsure at all n locations; Clone ID: 700560044H1
cgaagagattgccaggatctcttccccatctttccggagcaaggaattcataggattgtngatttgaatcctactaaccttgatgacctgttagcatctgctgacccttctgtnt

SEQ ID NO: 4855 - DNA, 180 bp, Glycine max
  unsure (1)..(180): unsure at all n locations; Clone ID: 700560045H1
ggtttaatcaatgatattatgagcaaaggcaggcgtatgacatatgaggaactctgtaatgctgtgctaccgcactggcataacttgaggaagcataatggagagcgttatgcatactcaagtcactctcaggctgttcttgattgtttgaggaaccggnatgattgggccaagntgntt

SEQ ID NO: 4856 - DNA, 156 bp, Glycine max
  unsure (1)..(156): unsure at all n locations; Clone ID: 700560047H1
atttccaccaaacccgtttgcnttgttgtttgcgaataaatggcaactaagaggagcgtgggaacgttgaaggagggtgtttgaaggggaagagggtattcgtgagggtcgatcctnaacgtgcctttggatgacaaccttaacatcaccgatgac

SEQ ID NO: 4857 - DNA, 172 bp, Glycine max
  unsure (1)..(172): unsure at all n locations; Clone ID: 700560049H1
gatcttgccaagaaaatctggtgctttngccctgagacccttggacccaacatggtggttgatatgtgcaagggagtccagtatttgaatgaaatnntcgattctgtggttgctggattccagtgggcatcaaaagaaggngctttggctgaagaaaacatgagagccatct

SEQ ID NO: 4858 - DNA, 276 bp, Glycine max
  unsure (1)..(276): unsure at all n locations; Clone ID: 700560050H1
ctctctcttcggtcagaaacatgaatttggaaacgcaaccaggaacggcgtcgtattggtgctacagctgcacccgtttcgtgcacctctctgtccaaagcaccatcgcctgcccccactgtcaaagcggtttcgtcgaagagatccgtgccggcgccggagccgaagcctcgccacgcnatcgactaagtcctttccccgatgatctcttttgctccggcgacagggttcngccgccgtagagagaagttccggaanngctcccgttnaacccgt

SEQ ID NO: 4859 - DNA, 281 bp, Glycine max
  Clone ID: 700560051H1
cactaattaggctactctcaatttcttctccttcactctcagagaactcatatggccgccacactcactcttctaaagcttccaatccttcctaacaagccattactgccacgcccatcaacctcaaaactttttccacttccttccatctattcaaaattaaatatcccaaaagattatattgtttctcctaacaacatcgatgctctcaagcctgcctttctttccctctcggcaatcacatttccattgttattagaaaccaaggatgcattgctgtt

SEQ ID NO: 4860 - DNA, 231 bp, Glycine max
  unsure (1)..(231): unsure at all n locations; Clone ID: 700560052H1
agaagaagatcgaacgaaggctccttccgttattccattcagcgattccatggtggcgagaggcgtgcnggcaatggcggcggtggccgttgccgcccttgacttgacggaatcctccaactggtggcgggacatcaaccgctccccgntctggnaggatcgcattttccacctcctcgcnatcctctacggaatcgtcgccgccgtcgctctcgtacaattagtgcgata

SEQ ID NO: 4861 - DNA, 141 bp, Glycine max
  unsure (1)..(141): unsure at all n locations; Clone ID: 700560055H1
tgctcaggcttctggagcatatattttccgccctgatggttcaccctctccnatcaaatccaacgggaagtctcctctcacagtttttcggggaccaattgtgcatgaagtgcatcagaagatcagtccatggntatacca

SEQ ID NO: 4862 - DNA, 175 bp, Glycine max
  unsure (1)..(175): unsure at all n locations; Clone ID: 700560056H1
ctttgtcatcagtggaagctgctatgatgcacatgccaatgacccatggatccttgacctcattgctctcnttatcaaattggactccatgcacaagaagatccttggcatttgctttggccaccagataattgggcgtgcattgggaggaaaagtgggtcgctctcccaatggt

SEQ ID NO: 4863 - DNA, 175 bp, Glycine max
  Clone ID: 700560057H1
cccagagggccaaaaagctattcaaacattgaaggatgtttatgctcaatgggtccccgaagaaagaatactgaccacaaatctttggtcggcagaactgtctaagcttgctgctaatgccttcttagcacaaaggatttcatctgtcaatgccatgtccagcatttgtgaggct

SEQ ID NO: 4864 - DNA, 97 bp, Glycine max
  unsure (1)..(97): unsure at all n locations; Clone ID: 700560058H1
tcggtggcatttttgttggttcgagtgagcgagggaagatgtactctagagattcatggggtngtccgttggagataaacgcgacggactcggcaac

SEQ ID NO: 4865 - DNA, 153 bp, Glycine max
  unsure (1)..(153): unsure at all n locations; Clone ID: 700560059H1
agagattagagaaacaactatggaaggagaaaatggaaagaagctgaaaatattgtgcctccatggattcagaacagtgggagttttcttaaaaagcaaatcagcaaatgggatccttctatattcactcaatttgatatggtttncccagat

SEQ ID NO: 4866 - DNA, 155 bp, Glycine max
  unsure (1)..(155): unsure at all n locations; Clone ID: 700560060H1
ctgtcaaccgtgcctgcgttcaattctctcacaatggctgaatccngcctcctatctctcccttccctcttctacgccaaaaacaaaaccctttctctctcaattcccactaatcctctcaacctgcaattcccatgctcaaactcttngntttt

SEQ ID NO: 4867 - DNA, 139 bp, Glycine max
  unsure (1)..(139): unsure at all n locations; Clone ID: 700560061H1
acaaacatttntccatganacttgcatctnccattattattctatcacatccatggccacagttgtgaagctactgttgtcccagaatgtttgaaccaacaganaacgaggtcgctcaggaggggattnggctcatgcc

SEQ ID NO: 4868 - DNA, 130 bp, Glycine max
  unsure (1)..(130): unsure at all n locations; Clone ID: 700560062H1
ttcctgaggatgattttgatgatgacaatgccagaagaagcattgtcttcccaccttctcctaatgctggtgggtcaatgatgagaaccacatctcagttgacttatccagatgccaatcttnnaagggg

SEQ ID NO: 4869 - DNA, 169 bp, Glycine max
  Clone ID: 700560065H1
caacaaaggagttgtaaattaagagcatggctgcacaagctcttgtatcatcatcatctcttaccttctcagccgaggctacaagacaaagtcttggaccaagatcactccaatctccatttggcttctcaagaaaagcctcctttcttgttaaggcagtgtactcccc

SEQ ID NO: 4870 - DNA, 169 bp, Glycine max
  unsure (1)..(169): unsure at all n locations; Clone ID: 700560066H1
ctaggcctctaagaagagctataatgcgacttttggaggacagcatggctgagaagatgcttgctagagagttaaagagggtgactcagttatagttgatgctgactccgatggtaatgtgattgtgctcaacggtagtagtggtgccccagattcattagaagaanct

SEQ ID NO: 4871 - DNA, 269 bp, Glycine max
  unsure (1)..(269): unsure at all n locations; Clone ID: 700560067H1
tgtttgttgtaggaagaggaatcttgagaaatggcaggggacagcaagagcangattctgttcatcggagggactggttacatcggaaaattcatcgtggaagccagcgccaaagctggccacccaactttccttttggtgagggagtccactctctccaaccccgcaaaatcacccctcatcgacaatttcaaaggcctcggtgtcaatcttgttttaggagatctatacgatcaccaaagtttggtgagtgctataaagcaggtcga

SEQ ID NO: 4872 - DNA, 269 bp, Glycine max
  unsure (1)..(269): unsure at all n locations; Clone ID: 700560068H1
cagaaatcttgaggcctgttgggtcagcaactcaaaggatatacatggctgtctattcattggagaagagtcttggcttggatccaaatgacccaatcattccatttgttgtncttgtaggctcttcagccacattatgggccttttattggttgtggacatatggaggttactcaggaaatttgtcccctaaatcagctttcgagcttttggctgaggacgcaaatgctgcacttattgatgtccgctctgaggaaatgcgagaaaaa

SEQ ID NO: 4873 - DNA, 277 bp, Glycine max
  Clone ID: 700560069H1
gttttgagttgttgcaggctgtgaaatctgtgttttctgcacaggcatcatcattattagtcccccacatggttaagccaattgcaccgttggatttggtgagggaaaagagagatgggagtgagagtgcaaatgctcttttatctggtttggcaattggggataagaataagaatattaataacaatagtagagtagagggaattggagttccgaagatttttgggcaggatttgaattgtgtgactcaatttagggagaaactgctgtgaggaaa

SEQ ID NO: 4874 - DNA, 217 bp, Glycine max
  Clone ID: 700560070H1
gtttgatgacaagataccagctcgcgactttgacaattttcagtttgttaacttcactgacataatggctaagaaatcaagcccctcagaaaaagaagctgcttttgctctggctgctctaatggagatacccttccaatataaagcagccactgaacttggactacttggtcgtgcaacaggaagatcaaataaaatagttccaagacttcttcag

SEQ ID NO: 4875 - DNA, 170 bp, Glycine max
  Clone ID: 700560071H1
caacttttgataaattgaggaggccattgagacaataggtgctagttctgcaatggttttattaaagagcagaggcaagtaaagaagaaattcaatcaaatgaagacaagtgggctaaatggaagaggggtggtatcattggtgctcctgccttaaccagggggaccttg

SEQ ID NO: 4876 - DNA, 90 bp, Glycine max
  unsure (1)..(90): unsure at all n locations; Clone ID: 700560072H1
gttttctacctgtngcaatggagtcatcataccctcctagagaaccaaagtgcatactnttnccnactcagatgctatcttcaganggtt

SEQ ID NO: 4877 - DNA, 162 bp, Glycine max
  Clone ID: 700560073H1
tccatttttgttaaccgccgtcgaaccgggtcgggtcgggtattaacgagacacctccacagagaggcagtaaactaggttgttggagttgttctgtctgaaaccgaaccacattccaaagatagccgttgtcattgtcagaaggagaaggcattgcgtttt

SEQ ID NO: 4878 - DNA, 159 bp, Glycine max
  unsure (1)..(159): unsure at all n locations; Clone ID: 700560074H1
gttcaaaccctagcgaagatccactgtcgccgtcgcacactcgcacgccgctcacaggtttatgggctacgctgatgtcctgaatttgttgttggccgtggtggtttggtgcactgcttacgttactgttgtagttctcgcttcctttcgagcgtttnc

SEQ ID NO: 4879 - DNA, 163 bp, Glycine max
  unsure (1)..(163): unsure at all n locations; Clone ID: 700560075H1
ataacgtgaaactgaaaggaaaatggcactctcagtctcctcaccctcatgcgtacgcgttccttcatgtttttggaaaccaaatggcaagagttgcaaagagcgtactaaggtttcatgtgcagctcacaatgntaataagaatccgttggttggaatcggt

SEQ ID NO: 4880 - DNA, 112 bp, Glycine max
  unsure (1)..(112): unsure at all n locations; Clone ID: 700560076H1
gccttagccttccctacaactccaaacagaaaganatcntcatccatggctgcntccgtntccactgtcggagctgtcaacagagctctttngaacctgaatggttnnggag

SEQ ID NO: 4881 - DNA, 163 bp, Glycine max
  unsure (1)..(163): unsure at all n locations; Clone ID: 700560077H1
caaagttgatagagtgctgatgtgctggtgggccttcacaggtctcacacacattattcttgagggttattttgttttctctcctgagtttttcaaggataaaactggcttctacctggctgaagtttgtnagtttctttggcattgaacaatgatattgttc

SEQ ID NO: 4882 - DNA, 141 bp, Glycine max
  unsure (1)..(141): unsure at all n locations; Clone ID: 700560078H1
ctctcttatcatctttgttattacctctttccaaagtccaaattgnctagttccaccaaaccaaaccaaaccaaaatggcagcagcctcagcntcatccatgatatcaacacnagccttatctccaaccatcnaaangcac

SEQ ID NO: 4883 - DNA, 164 bp, Glycine max
  unsure (1)..(164): unsure at all n locations; Clone ID: 700560079H1
gcagatccatccaactcattctagatcaaaactctggttgtggctttgcttccaagagtaagtacatgtttggcgtgttagcatgaagatcaagctcatacccggagactctgctggcactgtcactgnattttatatgaactctgacaccgacactgtacgtg

SEQ ID NO: 4884 - DNA, 95 bp, Glycine max
  unsure (1)..(95): unsure at all n locations; Clone ID: 700560080H1
ggctttcgggtaccattgaggtgcttgcntccatgacccacttgtctcangtgtggcttcaganagaaaccagttnagggtcccatnccggattt

SEQ ID NO: 4885 - DNA, 145 bp, Glycine max
  Clone ID: 700560082H1
ctctcttcggtcagaaacatgaatttggaaacgcaaccaggaacggcgtcgtattggtgctacagctgcacccgtttcgtgcacctctctgtccaaagcaccatcgcctgcccccactgtcaaagcggtttcgtcgaagagatcc

SEQ ID NO: 4886 - DNA, 276 bp, Glycine max
  Clone ID: 700560083H1
gcagacccctcaacattaaaagcaaggagtgagggtccagcagagatcattaggcatgttttgtttgggtactttagccagaaaacaggactccttgttcacttggaggactcccatttgacacgcattcagaacaatggtggcgaggcagtatattgggagaccacaataaattcatttcttgacgattacaggcctgtcgaggggataatgattgctcactcgggtcgatccgtggtgacgcttttccggtttggggaaacagcgatgagtcac

SEQ ID NO: 4887 - DNA, 92 bp, Glycine max
  unsure (1)..(92): unsure at all n locations; Clone ID: 700560084H1
ctanaccattccttgangcaatgnagcanagntgataatgcnggaggatgctgacagagagagcttcagaacctgtgttccattgngggaag

SEQ ID NO: 4888 - DNA, 276 bp, Glycine max
  unsure (1)..(276): unsure at all n locations; Clone ID: 700560085H1
gttgatgctattatcaagtgtcaaggtcttcctacaacatcaggatacatggttgtaaatatggaatggggaaacttttggtcatctcatttaccaagaacatcttatgatattgatttagactctgaaagccctaatccaaatgatcagggttttgagaaaatgatatctggaatgtatcttggtgacatcgtgaggagagtcatnctaaggatgncgctagagncnntntnnctngnnccnattcttccaaactttcaagccnntatgctgagg

SEQ ID NO: 4889 - DNA, 74 bp, Glycine max
  unsure (1)..(74): unsure at all n locations; Clone ID: 700560088H1
ctcgagcggctctctcaaactccccaattactttgttggcatttccacacaccancnagannnnaagaggngng

SEQ ID NO: 4890 - DNA, 106 bp, Glycine max
  unsure (1)..(106): unsure at all n locations; Clone ID: 700560089H1
aangtcttgaaattggacanatggaanaccacctataacgtgtnatcatgnggcnnnttattncgcaggctacctagtataccaaaagcaccactgtgcttgtact

SEQ ID NO: 4891 - DNA, 137 bp, Glycine max
  Clone ID: 700560091H1
gccaaaaagcctgcagactgggaggaaagagaatacattgaagaccctgatgatgtcaaacctgagggatatgattcaatcccaagagaaattcctgacccaaatgctaaagagcctgaaaactgggatgaagagga

SEQ ID NO: 4892 - DNA, 175 bp, Glycine max
  Clone ID: 700560092H1
gaagcacaaagagaagcattagcactaggagcagcaacaactagtctcagctgaaatggcctcttcagtgatggcatctgtggccctcaaacctgcccctttcactgttgagaagtcctcagtgagaggccttccctctctctcaaggaactcttcttcattcagagttgtggcg

SEQ ID NO: 4893 - DNA, 137 bp, Glycine max
  unsure (1)..(137): unsure at all n locations; Clone ID: 700560093H1
gatggccattctgaatatccagttgaatgcgctctcggtggtcaaccttgttatgtcagtgggcattgctgttgagttttgtgtgcatatgactcattctttcactgtagcaagtggagacagagatcancgtgcta

SEQ ID NO: 4894 - DNA, 117 bp, Glycine max
  unsure (1)..(117): unsure at all n locations; Clone ID: 700560095H1
ctggtgttggaattcctgatnacacataccatggctgaattatttctcttcagtntcgctgagtnctctcataacaaagcttgcttctcatgctttccangaagcttctcggntcgg

SEQ ID NO: 4895 - DNA, 200 bp, Glycine max
  unsure (1)..(200): unsure at all n locations; Clone ID: 700560096H1
aaaaacccttacagtactttataccaccctcatcaactactatggattcaacaacttccacagaaagtgaagtagctatgacatcccacccatcctcaaagtctacaaaaacggtcgcatagagaggctcgcaggcttcgaggttgttcctccgggtctcgaccccgaaactaangtggaatcgaaagncgtnntattcg

SEQ ID NO: 4896 - DNA, 306 bp, Glycine max
  unsure (1)..(306): unsure at all n locations; Clone ID: 700560101H1
ggcatagcaacnagctaagtgtcttnacaaanccatncttgtgacggccaatatcgcctgnattncaaacttgcaaccantagacctggtgacaccgnatgccaaattaagtgtggggacctgttcgaaaatagtgtggtngatgaantcnatgagtgtgcagtctcaggaagaaatgtgtacntaagaagtctgatgtgggagaatttcctgctccaaatcctgatgtccttgtnaatagcttnaacattgctgatttcagtgggcaagtggttcacactngtngcttgaatcctaccttcgata

SEQ ID NO: 4897 - DNA, 313 bp, Glycine max
  unsure (1)..(313): unsure at all n locations; Clone ID: 700560105H1
atacncanatccggttcttcncagctananaactgngnntanatatgccttnnactnagtggatgccgcaactgngnctngcctgatgntggtgttatcncntgatgttatangtgcatgccgtcgaggttggttatcgccatattgattgtcctcaaatttacggcaatcaggagggattggttnagcattacagaagttatntnangagggtgtagtcaagcgagangatgtattcatnacctctaaactctggtgtacagatnatgctccagaagatgtacnagangctctggacagaacntganagnnc

SEQ ID NO: 4898 - DNA, 305 bp, Glycine max
  unsure (1)..(305): unsure at all n locations; Clone ID: 700560107H1
ggcgaacaatatagatcagnaccaangcaacagttaaccaacaagcttantttnatgccagagacctcncaagtccatcccaaggacacatttgtgttcagtatagatggcaccgtactctctaatattccatactacaaaaaacatggatatggggtggagaaattnactcgaccttgtatgatgaatgggttaacaagggcaatgcaccggcactgcccgagactcttaagaattacaacaagctggtgtctcttggcttcaagattatattcttgtcaggaagaacactggacaaacaggcc

SEQ ID NO: 4899 - DNA, 308 bp, Glycine max
  unsure (1)..(308): unsure at all n locations; Clone ID: 700560109H1
gtgatancaattgagtcatttatacgagctgatnatggtacacaatttttagatggntagccgtgntgcctgaangatggccaatgcnttaccatgnacttggtgaaatacttgctantggtaagagggaaagcaaaagaacccaaggtcgacagtgagctcatttatgcattgcaaaaatagataggctgagtgacattgaggagttcattcttatgcctaatgttgctaatcttcaaaatgttggtgaccggttgtacgatgaagcattatatgaagctgcaanaatcatattgcttttatatcta

SEQ ID NO: 4900 - DNA, 301 bp, Glycine max
  unsure (1)..(301): unsure at all n locations; Clone ID: 700560110H1
gctgaaagtggaggacagcatgtgggtaaaaaactcaacaggnaatgatggaaacagtcgtgctncngaaactgcaaagcaggggactcaagctgttaaaattcagcccattgaagttcctgaattacaagtggatgaactcaaagaaatcaccgatggctttggaaaagttctttgattggagagggatcctatggaagagtatattatggtgttcttaaaagtgggcaggctgcggcaatcaagaattagatgccagtaaacagcctgatgacgatttttagcccaggtttcaatggtt

SEQ ID NO: 4901 - DNA, 299 bp, Glycine max
  unsure (1)..(299): unsure at all n locations; Clone ID: 700560111H1
cacacacctaacttgtttatgagagntataagtcacnaccttctagtttcactactcgattggaggnatctctacctcacgatccctntnttctnttagaaccatcatgtcacaatctgatcattcctnctgcttttaccacacccagattagttctcaagaaggtttggccaaatctcaccatgaaggggntgaanctgtggttanaanaggcnttggaagggngcgnnttaaaaanctgganccntcccnanggtgggatcnttctgagnntcncccngaagggntcngggannncc

SEQ ID NO: 4902 - DNA, 301 bp, Glycine max
  unsure (1)..(301): unsure at all n locations; Clone ID: 700560112H1
ctcattttcccacgacccattttcatttttccaaaaagatctcaactttgcttcaaactagaacactnccctctttttacgttcccgtttcatgggcatctcttggaatcgggaaccatagacatcgccatggaaaaggacaagtctcacactcacagctttcttacagtatcgtcaaacacttcaaattcggttcaccgaaaggattctgtttctgctctgttgtgtttgatcagagcgaaacaatgaagctgacgtacaccaaatggctgcacaggagcagaagatctttgcctagaaa

SEQ ID NO: 4903 - DNA, 305 bp, Glycine max
  unsure (1)..(305): unsure at all n locations; Clone ID: 700560113H1
gtgagtttgttgatcgngataactagaaacagtgtgatnnaaaatcnaggtgctngggnancntcgnnggttacaattttngtagcntggcnatgcgatacgtaangatatgttccctctccgaatgaacactgggctatggtncccgtactccggaggtgaaatgcgaagttggaggcttgctgtggnagcacacaacatctttanctttgagaccattcctgaagagtgcattgaagcaacaaaggaatacatccatgggcgaacaatatagatcagatccaaaacagttaaccaacaagctt

SEQ ID NO: 4904 - DNA, 302 bp, Glycine max
  unsure (1)..(302): unsure at all n locations; Clone ID: 700560114H1
ctcttcttctcttggcggctagggttttagcgcagttcttctagatttaaggnagatgggtaaggaacaaggttcacatgcagtattgtngttattggccatgttgactctgggaagtccactaccactggccacctgatctacaagcttggaggcattgacaaggtgttattgagagatttgagaaggaagctgctgagatgaacaagaggtctttcaagtatgcctgggtgcttgataagcttaaggctgagcgtgaaagaggaatcacaattgatattgccttgtggaagtttgaaacc

SEQ ID NO: 4905 - DNA, 293 bp, Glycine max
  unsure (1)..(293): unsure at all n locations; Clone ID: 700560115H1
ctcgagcnnccaaattccattttccaattcaaaacccnaactccgttcgaagcaccaaatcntgatggcaccaaaggcagagaagaagccagcagagaagaagcctgtggaggagaagaaatcgacggtgggagacaaggctccggcggagaagaaccaaaggccggaaagaagcttccgaaggagggaggcgccggcggagaaggtnnnnnnnnnnnnnnnnnnnnnnnnagcgtggagacatacaagatctacatcttcaagttctgaagcaggttcaccctgacntggta

SEQ ID NO: 4906 - DNA, 296 bp, Glycine max
  unsure (1)..(296): unsure at all n locations; Clone ID: 700560117H1
ggagaangggaanaggtataccaanaggaagatatggcanagggngagttgnttactggggtnnncgtgatgtattcagaaagcctacatttgcccgtnttctttcacttgtagtnattacaatccacatcaaggntgtaaggaagtagtcacatctgagngaggnaagagcaagcttctttcatagaagnaatcagtagaacagcaccaattaagtatctncacaagtatcttgcatncaagcaaattgtatcagggaattaccnagatttcaaaagaatgttaccagtctgtgg

SEQ ID NO: 4907 - DNA, 305 bp, Glycine max
  unsure (1)..(305): unsure at all n locations; Clone ID: 700560123H1
attaatagtacntgtgtantttgtgnctttgctttcgannattcccaaagtnnctagnnactggnagccngtgacaacgagaaaagcncttngcttgcttgtccactcctcanattggcnccttntatcactatcagatttagggtcccttctgccatactgcacacgtgaagatggcagcaacatcattttctggcatgcaatttgcaatgtcaagatcatgcattcctgcatcacaaaagattgcagatgctggtgccgtggttcttggcggcaagtccaagattggatcgtggaataacttg

SEQ ID NO: 4908 - DNA, 298 bp, Glycine max
  unsure (1)..(298): unsure at all n locations; Clone ID: 700560124H1
tctcacnctnntcttcananatttntctgtgcggtctaacaaacattctagttcacacgntcaagnntgtgtgaagatgggggcgggtggccgaactgatgttcctcctgccaacaggaagtcagaggttgaccctttgaagcgggtgccatttgaaaaacctcatttagtctcagccaaatcaagaaggtcattccacctcactgtttccagcgttctgttttncgctcattctcctatgttgtttacgactcaccatagccttctggctctattatgttgccaaccatattccacc

SEQ ID NO: 4909 - DNA, 235 bp, Glycine max
  unsure (1)..(235): unsure at all n locations; Clone ID: 700560125H1
ctgaaacatcaccctctganttcacaagattaanagattcaaagatttgcgaggtagcctctncatgcttgtttctactccattttaatggaaataaatcctcgaactttcagccgagttctttaggataagaggctaaatattcgatcacatgtactagtatagttatccatattttaaggcaatgctcaaattgattattagattaattcaaagttagtaacttactgtaaaa

SEQ ID NO: 4910 - DNA, 297 bp, Glycine max
  unsure (1)..(297): unsure at all n locations; Clone ID: 700560126H1
agaacatggggtttgaggaaactgagttaaggcttggactgcctggaaacggggcactgaagaagtgctcatcaggaagaggggtttctctgagactgaaactggtcatgaagatgagtctgccaccactgtggatttgatgcttaatctttcttctaagagnnnnnnnnnnnnnnnnnnnnnnnnnnnnnnnnnnnngataagcacaagactttgcctaaggagaagacccttctgccagcagatcctgctaagcctccagccaagacgcaggtggtgggttggccacctgtgcgg

SEQ ID NO: 4911 - DNA, 299 bp, Glycine max
  Clone ID: 700560128H1
cttcattttccattcgtagacgccaagaaccctaacaggagaatgcagtggacctgggataatttgtgagggatatttaacatcgtgtacattgtgctcctttaattattttcatcagttggtgttgtgatggatggtgataatggtcttaacatacgtaattgggttactatgaacccgctacgtcgtttaagagccacctggggctgcagctgatgtcatccttgccggaaaaacctttaattggagggcgcaatgctgtggttttagctggcactgatggggcatttcaccatagg

SEQ ID NO: 4912 - DNA, 296 bp, Glycine max
  unsure (1)..(296): unsure at all n locations; Clone ID: 700560129H1
cgaagccttgnaatggagttcgaatctncgacanccaaaaggaggactgagtcggtgattgtcccgccgccgcggaggacgcagagttcggctgtcgagggtgggtcgccgccgcctcctccggcggagagcgagaaagagagcngcgcctccgtggagaagctccgttggagtcgaaggtgaaggagagagaggagcaaaagctgaggatgaagctggcgaagaagataaggttgaggcggaaaaggcttcttcggaaacgcaattgagaaagaaggtagatggccaccttctaa

SEQ ID NO: 4913 - DNA, 300 bp, Glycine max
  unsure (1)..(300): unsure at all n locations; Clone ID: 700560130H1
gctgttaaaggatgtgttggaccaacgactacctcaaccagtgaatccagttgaccaaggaggtgntcntgataagcaaaaataaanatttgcttgcttaagtgaaagtccacgttttcgcccaagcatggaacaagtgtataacgagtttgtgatgccaacatatcttcagtgaatttattctccatggtcacacttagtcaactcgttgataatgaaccttgtttccagcctgttgtatgcttttttattgctttaactagtgaagaatctcagcacggtttactggagactcaatgc

SEQ ID NO: 4914 - DNA, 297 bp, Glycine max
  unsure (1)..(297): unsure at all n locations; Clone ID: 700560133H1
gnccactgaagtcgaacccctaatggcttntcaagttcttcttcaacagggcantgtttgccccccaagctaagtttcccttcttacttctcgtaacgtcgcgttaatttctagggttccttccaccccaatttcatggcgttgcactcctctcattgctagcctagtttcgctgtgagagctgactccaacgtcgaaggcgctggtgaagccaccgaggatgttcttcgtataatgttgatgaagtttcggaaggcgaaggagaacaagtttcggattctgaagctccaaaatctc

SEQ ID NO: 4915 - DNA, 301 bp, Glycine max
  unsure (1)..(301): unsure at all n locations; Clone ID: 700560134H1
gggctggtgctgcnttttctcgtgttgctagcggcggcaacaacgtctccanacacgcancacgacggtccgcctacgtacgttccacggtcaacgagagtttggactatttcgctttcgcgttgcaatggcccggtacttactgcaaacgcacccgcagttgtgccccaccaacggttgctgcagaggctccaattttccaacagtgttcaccatacatggactctggcctgactanaatgatggaacctggccgtcctgttgctctggatctagtttcgatccaaaagagatattgaca

SEQ ID NO: 4916 - DNA, 272 bp, Glycine max
  unsure (1)..(272): unsure at all n locations; Clone ID: 700560135H1
ccggagggtntttgggtgacganantactttgcntggtgccatcnncggccgtttancgacagacttccgacctactccgccacatttgtatgtcttgaatcagcagaagcctttggcctngatgccaataacttnagtacatcactgatcacttccggtacaaatttgcaaatgagaggctganaagaacagcaagatattactcatccaattggagaacttgggctgctgtcaacatcaatttgcttggagagttacaggcagaggataa

SEQ ID NO: 4917 - DNA, 299 bp, Glycine max
  unsure (1)..(299): unsure at all n locations; Clone ID: 700560136H1
accaaatcaaatctctcannagtccaaaactcaagctccatatttnttngggctgttnnggacntcngganntcatttactgctcanatggncgagatcnacgtgcctcctttncttcgtatgnnctatctcattagagctcatgaaggaccccgttacggtctcaccggcatcacctacgaccgncacagcatcgagaagtggctcttcgccgccgtgccgaagaacaacacgtntcccgtcacgaagcagcccctcctcgcgganctcantnccaaccacacgctccgcagctcatc

SEQ ID NO: 4918 - DNA, 298 bp, Glycine max
  unsure (1)..(298): unsure at all n locations; Clone ID: 700560138H1
gagagnnatgggnagagtatttgtgtgctcataatantctatacatcttctggtcagctnaatctgnttcancancctgttggnaggtanaatgcttaggtcaccattggaanctgatgatncagggaagaacaataatccaganacgaagatatatgacaggatgagcttcttggcanggatgcagtcagaggcagannagatagtagagatgaggaganattctagctnctgacacagggccgtctaacattcaatcttctggtgaaaatgttggtggtagttcctcatcaaataa

SEQ ID NO: 4919 - DNA, 292 bp, Glycine max
  unsure (1)..(292): unsure at all n locations; Clone ID: 700560139H1
actttccangcttcctgcgcacactttgataagtttttngngcnagctccaatggncntcttctcaaaatcacntcatcattgaggaacttggcctgcatttgaaaggtttcaaccttcaacgcttcgatttccttctgctgggcacgtcagaattggacactgacacaaacctcgtttccctctttcgttgtcaaagccgccactgttgtcgcccccaagcacaccactgttaagcctctgggtgatagagtactggtgaaaattaaggatgcagaggagaagatgcaggt

SEQ ID NO: 4920 - DNA, 296 bp, Glycine max
  unsure (1)..(296): unsure at all n locations; Clone ID: 700560140H1
atcccttttattgaaatcctcaagcttcaatttgctttgtgctcactcatctatctattataacccaaacacnnnnnnnnnnnnnnnnnnnnnnnnnnnnnnnnnnnnnnnatctgtgacgagcatcatggcctcgagagcagtgctattgttggctatgttgtgcttccggccatggttgtggccattcgcccagcaaagaaccctttttgcgtgaagggtcgcgtctactgtgacccttgccgtgctggttttgagacctcagcaaccacctacattgccggtgctgagatatg

SEQ ID NO: 4921 - DNA, 294 bp, Glycine max
  unsure (1)..(294): unsure at all n locations; Clone ID: 700560141H1
ggaccctaaatngttcgggatcgtcaccaaggaggcgccctacntccgggcccacacggtccgttaccngacacagctccgagaagccgacagcctcatgtcctcgtaccgatccgaacccgcgtgttttccggccaccgccacgctccgcggcaacgagggtgcaaacttgccctacataacctccctgacgaggtttatgagaaggagtgggatttgatcatgatcgacgcgccgaagggtactttgcggaggcgccggggcgcatggcggcgatattctcggcggggtgat

SEQ ID NO: 4922 - DNA, 294 bp, Glycine max
  unsure (1)..(294): unsure at all n locations; Clone ID: 700560147H1
ancctccagcttcctntnattgcncgcttccctgacgttctgaagaaccggttggagtcctccagtcggcgttcgattatgncaatccaatctggagggtacgagtctcattaccaaggagtttaccccntgaaatgcaaccaggaccggttcgtggtgaggatatcgtgaaattcggttcacccttccggttcggtctggaggccgggtctaagccggaatccttctggccatgagctgtctttgcaaaggcaaccccgacgcgcttttgatttgcaaggcttcaaggacgcg

SEQ ID NO: 4923 - DNA, 299 bp, Glycine max
  unsure (1)..(299): unsure at all n locations; Clone ID: 700560148H1
cttcagnancttgtttacacctagtnctctcnctntnccaganaccacacatggcnctcatggaccatganatacaccttgacnacnggtntgcntncactttgtcatatgctattaagacctccaccatcatcaactacaccgacaatgaggtcatggccagtacgaggagtggttggtgaagcaccaaaaggtgtacaatgagttgggaaagaaggacaagagattccaagttttcanggacaacttaggggtcatacaagagcacaacaacaatctaaacaacacttacnaacntg

SEQ ID NO: 4924 - DNA, 291 bp, Glycine max
  unsure (1)..(291): unsure at all n locations; Clone ID: 700560149H1
accaatcaaaaaccatgaatgctaagagagaaaagggagagtgctttgaaaatggggaaagtntagttcaagttacagtacttctgattttgttcactttggagttctacttccctttcttctgttatcacagttgttctttcaacttgcatggttggctccatagtaaagttccttcctggattagagggaccccttccttttgttcttgaaaccgggtatgtgggagtgggtgaatcagaggatgtgcaggcatctactacttcattgagtcagagaacaatccaaagg

SEQ ID NO: 4925 - DNA, 293 bp, Glycine max
  unsure (1)..(293): unsure at all n locations; Clone ID: 700560150H1
ctgctcgagctctctcactctcgcgctctctctttcacaaccttcactttactctctctngacaagttaaaatgcaaggaggatttcaatcatttttgtcacacgggaatgtcattagaaatgctgttctacaacgggtgcgcatggtgaaccccctttacagccaattgtctcttcgcggtttgaatctgttacacctgctcgcattgaggagcatggttttgagagcaccacaatttcagacatcttgaatgataaaggcaagggtgctgatggctcctggctttggtgca

SEQ ID NO: 4926 - DNA, 292 bp, Glycine max
  unsure (1)..(292): unsure at all n locations; Clone ID: 700560151H1
cttnacctgggacagatttccaagaagaaaagcttactagatggattgtcaaatctgccctcantggataaagaacttcaagaaaaggattttgagcaacgtgctctagataaacttgttgtgatggcttatgagaaatacatggcttgttggggcctagtccttctggtgggaaaaatacaagcaacaaaatggccaagcaagctgcactgggatttgtcaaacggacattggagcgatgccatcaatttaaagatactggcaagagctgcttcagtgatcccttattcaa

SEQ ID NO: 4927 - DNA, 295 bp, Glycine max
  unsure (1)..(295): unsure at all n locations; Clone ID: 700560152H1
ccgntgcagtttaancatatcaataagcggnggaaaagnaactaacnaggattcccttaagtaacgggcgagcggnncgggaaaagcccaccatgaaaatcngtcgccctcggcgtgccgaattgtagtctggagangcgtcctcagtggcggaccgggccaagtcccctggaanggggcgccaganagggtgaganccccgtcgtncccgnacnctgtcgcaccacgaagcgctgtcggcgagtcgggttgtttgggaatgcagcnccaatcgggcngtaattccgtccaaggc

SEQ ID NO: 4928 - DNA, 294 bp, Glycine max
  unsure (1)..(294): unsure at all n locations; Clone ID: 700560154H1
ctcatgctgccnccacgcatcagtgccagtgccgccgagaagaanaacgngctncatcgcaganaacaanagcggcgggcatgcatcantggctnttactttgccaaagagcttcttggtgctggccactcagtcaccatactcactgttggtgaagaggctccgacaagatgaagaaacctcctttcaanagattctcagaaattgtgagtgccggagggcgcacggtgtggggaaatcctgcagaagtagggagtgttgtaggaggggnagtgtttnatcccgncttggaca

SEQ ID NO: 4929 - DNA, 295 bp, Glycine max
  unsure (1)..(295): unsure at all n locations; Clone ID: 700560155H1
ctttgtcatcagtggaagctgctatgatgcacatgccantgagncattggatccttgaacctcattgctctcgtnatcaaattggactccatgcacaagaagatccttggcatntgctttggccaccagataattgggcgtgcattgggaggaaaagtggtcgctctcccaatggttgggacattggtgttaaagcnataaacgtgtcatcatctntacccttggcttnctcatctcttaagctcccatcaaagctttccatttacaaatgtcaccgggatgagatcctagagct

SEQ ID NO: 4930 - DNA, 296 bp, Glycine max
  unsure (1)..(296): unsure at all n locations; Clone ID: 700560156H1
tctctgcttccttcaattcaatggnttccaaagagatagncaganagctccctncttctctcccgngtctacaacganggaaccgtggaacgcttcctaggttccccgcacgtgccaccctccctcttagaccccgaaacattagtctcctcgaaagaatcgtcatctccgaaaacccctccatctccgcgcgcgtgtacctcccgcccaaactcaacaantcccaccaacaaaagcttccgatctttgtttacttccacggcggcgcgttctgcctcgaatccgcgttctccttc

SEQ ID NO: 4931 - DNA, 292 bp, Glycine max
  unsure (1)..(292): unsure at all n locations; Clone ID: 700560157H1
aaattattacggaggtccacatggggcccatgttgtgaggatgcaacaaaatggatggggtccngtggcgganagtgnggtgcaccancaccacctcctccaatgatgatgagtagtgctgagtttagctccaattactcgacgggaccgnccccgtgcctcctccctcaccaaacnttgctctgggcctcaaagggggcaccttcacttacgaggnattagcagctgccaccaacggattcaatgatgcnnatttgataggacaaggtggattcggctatgtccatanggg

SEQ ID NO: 4932 - DNA, 296 bp, Glycine max
  unsure (1)..(296): unsure at all n locations; Clone ID: 700560158H1
tgtagactnatttgcaatcaatnactataaggcttgagggantggaggcttaagcgacnagncacaanaggcagtggaatgaggcatcgccaaactccctgaagatttgagaagtcgtgttagacgatttgttcaatataaatggctgctactcgtggagtgatgaggaaaccattctacgtgccttacctgctgatcttcgccgtgatatacagcggcatttgtgcttagaccttgttagaagagttcncttcttctcacagatggatgatcagcttctggatgcaatatgtgag

SEQ ID NO: 4933 - DNA, 294 bp, Glycine max
  unsure (1)..(294): unsure at all n locations; Clone ID: 700560159H1
gagatgaggcacacnngaactcnacaaggagcagancnatatcagaaagctntnaatgagaatgggngtacaaggagganagaacagcatgacnccctcagantacaaggagaaannaaattcaagaaagggactaccttttggatttggcaaccttganctcacatgtgtcctgctgatgatgataccanatctgtganggttcttgtgcaaatcacattactgttctccaaacatcaccggcggccaccgcgaatgactacttcaaatccaggnggacaaacagtttggggg

SEQ ID NO: 4934 - DNA, 291 bp, Glycine max
  unsure (1)..(291): unsure at all n locations; Clone ID: 700560160H1
agagtatatgatgatgaagtgaggaagtggatttctggtgttggtgttgacagtgttgggaagaagcntgtgaactcaaaagatggacctccaacctttgagcagcccaagatgactctggagaagctcttgctgtatggtaacatgcttgtccaaaacaagagaatgtcaagagagtccaattggctgacaagtacttgaacgaggctgctcttggaaatgctaacgaggatgctattcagaggggaactttcttccagtcttgaattggaggcaaagcaaacttggcaa

SEQ ID NO: 4935 - DNA, 298 bp, Glycine max
  unsure (1)..(298): unsure at all n locations; Clone ID: 700560161H1
ctgataatgctgaagctttggnngggacttganaccttgcaaattctagctattcctgggagnagggtgaggcanntccnagcatcnngcgcaaggcnacaactaangcatncacgtcacagacctgggctgctcttgcatcgtttgcattcaacctcccagtgaaagggccccaagcataagcagacatgcacatgtaatgtatgcttancagtgaagcgacgtttccgtacccttatgttacggcgtgagaagaaacaatcagaaaaagaagcagagacaatcgtaaaaagcaaca

SEQ ID NO: 4936 - DNA, 297 bp, Glycine max
  unsure (1)..(297): unsure at all n locations; Clone ID: 700560162H1
gggnaccttcatatnttggtacaggcacttttgcattnttcccacatgnancatgaggctanacatgcatttggccaaccatgggggtcaaagttttcatcctgtcgaggttgatttgccagccatgatggcccaaaaagataaagcagtttctaatcttacaagggtattgaaggtctattcaagaaaaacaaggtaaactatgtcaaaggttatggcaaattagtttcaccatctgaggtctctgtggacaccactgaaggtggaaatactgttgtgaaaggcaagcanattata

SEQ ID NO: 4937 - DNA, 297 bp, Glycine max
  unsure (1)..(297): unsure at all n locations; Clone ID: 700560163H1
gcgatccttcaacactcgctacacgcnccacgcncgcngantcgctncgacgaattgcntnnacagttcaccatcaccggacccctncatgccctggccaccccatcgtcttcgccagcccgggcttcctcaagctcacgggctacgcggcccgtgaagtctgggccgacccgccgccatcttccagggcccgcgaacttcgagaaaatccgtcattgaaattcgcgaggccgttagagaggagcgaaacgcgcaggtcgttctgctcaactaccgcaaagacngcacgncgttttg

SEQ ID NO: 4938 - DNA, 283 bp, Glycine max
  unsure (1)..(283): unsure at all n locations; Clone ID: 700560164H1
tgcanaccgttgaaagtgggtgattcacattgagcgcataacccgcgaganggtgaatggttccaccgtcaacgttgggattcacccctccaaggttgtgctgaccaagctcaaattggacaaggaccgtaaggccattctcgatcgaaggccaagggtcgcgccgccgccgataaggagaagggtaccaagttcgctcccgaagatatcatgcaaaccgttgattagtctcttttgcccccttatcatacaaacccatagagaaanttgtttgtatgataag

SEQ ID NO: 4939 - DNA, 292 bp, Glycine max
  unsure (1)..(292): unsure at all n locations; Clone ID: 700560165H1
caagtcacaancacttagntcaaggaggctcgacgctaggtnaagagttaactatcccacaaaattgtnatgtgaatgctcataaatanactttgttacatcaacagtctccctaaaaaaaactttattacatgaataacatgctctaaaatatatttgagggaaaatggcacatgattttgactaattgacctttaaacttgtagcagatagaattcattcaaccttttacagtnaggtagtgactacctgagtctggtacatagatgcangantaaatannagaacatcc

SEQ ID NO: 4940 - DNA, 291 bp, Glycine max
  unsure (1)..(291): unsure at all n locations; Clone ID: 700560166H1
ctttcttttctttgccaacactccttcgattaggggtttcgatcccaattncaaattnggtcgccntgagacgcaacctcatactcctanctcttccttgtacnttccgcagtctccatcatcggaatttctcancgttttgttctgatatccaaatcctggctatgttgattgccattcaaattgtaataagtctacatctcaagcgtctttgtttttgtgttccgactccaacagtagnaganaggtgttttnggtagaccactttgtgtgaacccctctggcaggaga

SEQ ID NO: 4941 - DNA, 289 bp, Glycine max
  unsure (1)..(289): unsure at all n locations; Clone ID: 700560167H1
tgcttacgtgatagcatttacagccctanccagtggaanctcntggcangatcnagtggcaagcagaattgctgcagaacgtcaaaaaactgctgattctgcaattgcaaacatcacttgcagcaattcagtgaatatatatgttggtattgtgttccatggcttattgatactttgtacaacttcatagcatatagagaacctctccgaatccaaaatgcagggggactaagcttttcgttgattgttttcttctccacttctgtcgggtgtatctcagttttggttt

SEQ ID NO: 4942 - DNA, 290 bp, Glycine max
  unsure (1)..(290): unsure at all n locations; Clone ID: 700560168H1
tgtacaaccatactgtaaaactgaacgttatcagcaggagagtacgtcaactaacagtngccacagaagggctggaagtgactggaaaaaggggaaatcactgagcattggcatgagctgaaaaccagataggngacagtttctgaaaaaaaatttagcactaatagggtccaccggaaggcatganatagttgtctcttgtcaagctctggataacatgttgaaagtaagagtttggccatcttgagctggtgccattctaagataagaacatctcttcagcttttggc

SEQ ID NO: 4943 - DNA, 290 bp, Glycine max
  unsure (1)..(290): unsure at all n locations; Clone ID: 700560170H1
gccaagtatantaaatgtctgagtctnaagangggggcanaacnggcttcnantgattcgnaagttgcctncnaatccantctgnctaaccgagtgancanatataacttgttttngatttcttcntcatcattttgcntatacaaagattanaatgaacggtttttggngatngcttcaatatgattttgctgangttgtgcttcaccaacttgagcatagctttgctcaaagtcatatgaatggnttnggagagcagccactggccaagattgccatcacaagaccgt

SEQ ID NO: 4944 - DNA, 294 bp, Glycine max
  unsure (1)..(294): unsure at all n locations; Clone ID: 700560171H1
aaaagcttcnccaaccacaccgagtcaccgactcgaagccactcactcgggacttcgctctcaaccatccgacggccatgaatcttagctatgagcagaggctccaggttgtcgccagactcattctcgacgaagactcacgccccggagacgcgccgcttaccaggaggagcttgggctgagggtgaccctcaagccgcaccaggtggaaggggtttcgtggctcatacggaggtacaaactcggtgtcaagtcgtcctcggtgatgagatgggatgggcaagactttgcaag

SEQ ID NO: 4945 - DNA, 289 bp, Glycine max
  unsure (1)..(289): unsure at all n locations; Clone ID: 700560172H1
caatcctttcgttattctcttattcatccttctcttntgaanantccagancncntnctgnccnnatgcncgtcacgcntttcgtaaccggatctgtatggatttgatccagatctacacgccgatggtggttttggccgggtctttcatagattggtgcgtagaggctcagatctacggtaccgaggtacaacagagaatcgatgacaagaacgcanatccgacggtagatccagccgattccgcttgttcgatcgctacagacccctgtatcggatcntaagcagcg

SEQ ID NO: 4946 - DNA, 295 bp, Glycine max
  unsure (1)..(295): unsure at all n locations; Clone ID: 700560173H1
cactcactaagctaaacaatttcatcaagcctgccatggcttctcgtgtggtntnctctggccattngcagctgttgnccatctnccacaccaagttcccagaagaatggatcactcttgggaagcacaaaagcttcttttcttagtgggaggaaactgaggtgaacagttttacagcaccagttggagcacgatccagcactacagtgtgtgcagttgctgagcctgataggcctctgtggttcccaggcagcacccctcctccatggctagatggcagtttgccaggagattt

SEQ ID NO: 4947 - DNA, 299 bp, Glycine max
  unsure (1)..(299): unsure at all n locations; Clone ID: 700560174H1
ttagaaacctngtaggaggtgcganacgtagntgncgcaatccnaanccacgatggagcactctnctactcaanactnccacgaatntgtacatctacgccttccncccctntcgtgtttnccacaanggttactcnttntncctntcctatttcaacccatgcatggcttgtctgagccgntnnnnnnnnnnnnnnnnnnnnnnnggcgccagctggctctcttcccctgacgaaatgctccaacantgccccctctncgnccaccaccgccgtctncgcgatgacgacgccgaacct

SEQ ID NO: 4948 - DNA, 286 bp, Glycine max
  unsure (1)..(286): unsure at all n locations; Clone ID: 700560177H1
gaaggaattgaaatgaaatgagacgacagttagttttgnanttaactaaaagttgtcgttnagaaangaacgggccntaatgantncaatgtaatttctgaaactgataattaaacatttgattnggttgtgcagcatgacgtggatgctggtgtttgaagaaagtggtgttggctgagggagcagcggttaccgtcaaaggtgcaagatccgttagtcttcggcaacctcttgatttccctcttccgttaaaccgaacggagaatggtttgctaacggtctttaa

SEQ ID NO: 4949 - DNA, 291 bp, Glycine max
  unsure (1)..(291): unsure at all n locations; Clone ID: 700560178H1
caaagtttcgttattctcccgttaatttgttgaataaatccacaagccacctnctttggtantgctggatctcgtctctctgctatatatagatanncatatttattgattgtctatgaataaaatcttcaggttttgttacagttgtaataattggtggtgattggattgaagagaaaaagaagattatgaatatggggttgaaattgaaggagacgttctacttgtcccatggagcaccaagtctagtcatagatgattcaatccctgcgtggcacttcttcaatcctg

SEQ ID NO: 4950 - DNA, 287 bp, Glycine max
  unsure (1)..(287): unsure at all n locations; Clone ID: 700560192H1
ggcagcgtcactacaagcagcagctactttnatgcaacccaccaagttgagcaggagcaacaactttgcagcnaaantctactcagtccatttccaaggcttttggtttggaacctgttggagctaaaaaggtcacatgctcccttcaggctatcttaaggacttggctcacaagtgtgttgatgctaccaaaattgcaggattcgcccttgccacctctgccctcgttgtctctggggcaagtgctgaaggtgttccaaagaggctaaccttcgacgaaatccaga

SEQ ID NO: 4951 - DNA, 297 bp, Glycine max
  Clone ID: 700560201H1
gcagaatcagatatttgaaggttagaacgaaaaagaatcatcgatggcagagacgaaagaaggttcaggttcggagatgtctctgaaggatcagggcaacgagtttttcaagtcaggaaagtatctcaaagctgctgcactctacactcaagccatcaagctagacccttctaaccctaccctctatagtaatcgtgctgcagcactactgcaattggataagcttaataaagctctagatgatgcagagatgacaatcaaattaaaaccccaatgggaaaagggatatttcaggaa

SEQ ID NO: 4952 - DNA, 293 bp, Glycine max
  Clone ID: 700560202H1
aaaagccttagccttccctacaactccaaacaggtaagacatcatcatccatggctgcctccgtctccactgtcggagctgtcaacagagctcttttgaacctgaatggttctggagctggagcttcagctcccagttcagccttctttgggaccagcttgaagaaggttattgcctcaagggtccccaacagcaaggtttccggtggaagcttcaagattgttgctgtagaagagaagaaagagattgaagagacccagcagaccgacaaggacagatggaagggtcttgcc

SEQ ID NO: 4953 - DNA, 193 bp, Glycine max
  unsure (1)..(193): unsure at all n locations; Clone ID: 700560203H1
gtagtattttcctacttttgctttcgctgaattcagtgtctcgtacactgttcttgttccattgattctaatttnntatcttcttaacatgcacactttgctttcagaagcccttactcaccctccactcctctctcacccaccccgaactcgctcttccacaaaacntncnagcncgtcncttcttncctca

SEQ ID NO: 4954 - DNA, 287 bp, Glycine max
  unsure (1)..(287): unsure at all n locations; Clone ID: 700560204H1
ctcttcttctcttgcggctagggttttagcgcanttcttctagatttaaggaagatgggtaaggaaaaggttcacatcagtattgtggttattggccatgttgactctgggaagtccactaccactggccacctgatctacaagcttggaggcattgacaagcgtgttattgagagatttgagaaggaagctgctgagatgaacaagaggtctttcaagtatgcctgggtgcttgataagcttaaggctgagcgtgaaagaggaatcacaattgatattgccttgtg

SEQ ID NO: 4955 - DNA, 287 bp, Glycine max
  Clone ID: 700560209H1
gagataactagaaacagtgtgatgaaaatgaaggtccttgttttcttcgttgctacaattttggtagcatggcaatgccatgcgtacgatatgttccctctccgaatgaacactggctatggtgcccgtactccggaggtgaaatgcgcaagttggaggcttgctgtggaagcacacaacatctttggctttgagaccattcctgaagagtgcgttgaagcaacaaaggaatacatccatggcgaacaatatagatcagactccaaaacagttaaccaacaagctta

SEQ ID NO: 4956 - DNA, 285 bp, Glycine max
  Clone ID: 700560210H1
tgctcctctcatccgtgatgggcgtatggagaagttctactggggcacctacaagggacgatcgtgttggcgtctgcaatggaattttccgcactgacaatgttcctaaggatgacattgtcaagcttgttgacaccttccccggccaatctattgatttctttggtgcactcagggctagagtatatgatgatgaggtgaggaagtggatttctgttgttggtgttgacttcattgggaagaagcttgtgaactccaaggaaggacctccaacctttgaccaac

SEQ ID NO: 4957 - DNA, 285 bp, Glycine max
  unsure (1)..(285): unsure at all n locations; Clone ID: 700560211H1
gaagataatatgagtaaaatttaacttgtttgattcggcagaaattgatttttaaatccttttacattctaactatnnnnnnnnnnnnnnnnnnnngccttatcccactaggtggggtcggctacatggatcaacttccgccataatgttctatcaagtaccatacttctattgataaaatatacagactgaaaatgtaaatgttattacttattattttagtattttctgtttataattcaatattcatgtagttctatcattaatcttcttcagatatgaagt

SEQ ID NO: 4958 - DNA, 285 bp, Glycine max
  unsure (1)..(285): unsure at all n locations; Clone ID: 700560212H1
gtaggaaggaggtgcattggtccattatccgttgttaatggaaatggaagtggaagtagcacttccattttccaatttccaatttccagtggagtagaacacattcattcaattgcaatttantataatttcatatatcctccaatattgctggtggttagcactcacangagacaggctcaactaccagacaaattttccattcccggcatctcctccaaacctacgtaccccagataccctaaattcgattcatacacataacacaacacaacctcgttcctt

SEQ ID NO: 4959 - DNA, 285 bp, Glycine max
  unsure (1)..(285): unsure at all n locations; Clone ID: 700560213H1
gccaacaatattgatgatcatgtctaaatttgaaggctttgggatctatatcttctctggagagaagatcagcttctagatattatcttttcaantttgncaatatattccttgggaacatacttactggaacagcatttcaacagctgagctctttcattcaccaaccagccgaccaatatcctgtaacaattggcactgctattcctttaaaagcaagttttttcattacttatataatggttgatggatgggccagtatagctgcagaggttttgatgttga

SEQ ID NO: 4960 - DNA, 285 bp, Glycine max
  Clone ID: 700560214H1
ctttcagataactgatagttgtgtgcaattatttgaattcaagaatgtctcaacccgactcgttggtggctgagattgaggtgaaaacctctgctgatcacttttacgacaccttgaagggtaagaaacagcatcgtattcatgatgttgcccctcatcatatccataaggtggaagttcatgaaggtgagtgggataaatctggcaatatcaaggtgcttacattcgctgatggggacactgttgagaccttaaaggagagagttgattttgatgatgaaaaca

SEQ ID NO: 4961 - DNA, 287 bp, Glycine max
  Clone ID: 700560215H1
atttttcttcctcagtagtgtcatttacgcttctcttctctgcagcaactatgcctaaccctaaggtcttcttcgacatgaccatcggcggtcaatctgctggccgcatcgtgatggagctctacgccgacgtcactccccgcaccgccgagaacttccgcgcgctttgcaccggcgagaagggcgtagggcggagggcaagcccctccactacaagggctcgtccttccaccgcgtgatcccgagtttcatgtgtcagggtggcgacttcaccgccggaaacggaa

SEQ ID NO: 4962 - DNA, 98 bp, Glycine max
  unsure (1)..(98): unsure at all n locations; Clone ID: 700560216H1
ttctctnctntnctcttcganggtaaccctcctcgcagatncgatncgcacccttnantaaaaccnattattattgattattgattgatantaacatt

SEQ ID NO: 4963 - DNA, 289 bp, Glycine max
  Clone ID: 700560218H1
gagataactagaaacagtgtgatgaaaatgaaggtccttgttttcttcgttgctacaattttggtagcatggcaatgccatgcgtacgatatgttccctctccgaatgaacactggctatggtgcccgtactccggaggtgaaatgcgcaagttggaggcttgctgtggaagcacacaacatctttggctttgagaccattcctgaagagtgcgttgaagcaacaaaggaatacatccatggcgaacaatatagatcagactccaaaacagttaaccaacaagcttact

SEQ ID NO: 4964 - DNA, 287 bp, Glycine max
  Clone ID: 700560219H1
aattaagatggctcagcctgatacctctctttggattaaaagctctgatggcaggaatgaagtactgaaccatgatgagtatgcaagactgttttctccttatattggatcaaaacctgctgctggttatgtgactgaagctacaagaggaactggagtagtatcagccagcagtttgggccttgttgaaatattgatggatgcggatcaatggtcggagatgttttcatctatgattgctagtgctgccactgtggaagtactatctagtggcacgggtggaacca

SEQ ID NO: 4965 - DNA, 278 bp, Glycine max
  unsure (1)..(278): unsure at all n locations; Clone ID: 700560220H1
tttgttgtgcttcactactaancaaagcaagagatatagagagaggnaaacanatacatacaaggaacaaatgcttgatctgcttcctatgaatcanctcgctactctggtcagaaatatccagcatttgttccttgtatgtatatgttttcctctctctatatctcttgctttgttttgttgtgcttcactactagatctgaatttttttttgctgttactattcatcatccactcattaagcaatcaggggtaactaggtggatatatnccaaata

SEQ ID NO: 4966 - DNA, 286 bp, Glycine max
  Clone ID: 700560221H1
gaccaatttgattcttctctctatcgtcttcttcctctgtttcgtcagggtttccttttctcacttggagctcccaattgaaacccaatttcgtaatccctccacactttctcgttcggaaaactcgcgaattggaaagacatcgacggctccgcgtgatacgttctcttcctgtctggttatcaatgttggctattagtgcaattgcatctttgcccgtattaccaccagtcagaagaggtggccactgcattgaacagaatgttgtttccacattgagctttcc

SEQ ID NO: 4967 - DNA, 287 bp, Glycine max
  unsure (1)..(287): unsure at all n locations; Clone ID: 700560222H1
ctccacccacccagcatatctctctattcctatttattagcacccctcacattaccttgtgtcaccaactactttgactcctttaccataccattacaataattatcaaacctaaccagtaaaaatggtgaccgtggaggaaatccgcaacgctcagcgttcccatggacccgccaccatcttggccttcggcaccgccacgccgtccaactgcgtctcccaagccgattaccctgactactacttccgcattaccaacagcgnacacatgactgatctcaaagnnc

SEQ ID NO: 4968 - DNA, 286 bp, Glycine max
  Clone ID: 700560223H1
gccacactacaccgagattccccctaaacccgtttgcgttgttgtttgcgaagaaatggcgactaagaggagcgtgggaacgttgaaggagggtgatttgaaagggaagagggtgttcgtgagggtcgatctgaacgtgcctttggatgacaaccttaacatcaccgatgacactagagtccgtgctgctgttcccaccatcaagtacttaactggtcatggagccaaagtgatccttctagccacttgggacgtcctaaaggtgtaacacctaaatacagtttgt

SEQ ID NO: 4969 - DNA, 93 bp, Glycine max
  unsure (1)..(93): unsure at all n locations; Clone ID: 700560224H1
gcagctagagcttcaacacagcgcctagttgtgagcaccanaccaaaccacattngnttncnaggcagcgnagaagnnngtnactgtccangc

SEQ ID NO: 4970 - DNA, 286 bp, Glycine max
  unsure (1)..(286): unsure at all n locations; Clone ID: 700560225H1
ctcaacccacaagaatccctccctttctgggctttctctctctaaaactatcatgtcctccaccgcggctcccgtccttcccatatccaacccccanaccaccgccgcanggcgggcgccatcgaggctccggcgaacaacccggccttccgcgccttcatcaacaacctctccgcgtccctccgacacggcctcgaccagcgccgcccgtggtcggagctcggggaccgctccggttctcgaagcccgagtccttctccgaagccaccctccgcgtccgcaagaa

SEQ ID NO: 4971 - DNA, 284 bp, Glycine max
  Clone ID: 700560226H1
gttcggagagacctagtacctaatgggacctggcagcgttaagatggtggcagtggattcggatgatctctggtttgcgtataacttgatagctcccggagactctgtcatggccgttactgtcaggaaggttctaagagaagctgctaatggcggacgggaagcagaacgcgtcaagctcaaattggaaattaaagtcgaagagctttctgattatgacaaagaaggttctattttgcgtgttcgtggaaagaacattttggagaatgaatatgtcaagattg

SEQ ID NO: 4972 - DNA, 287 bp, Glycine max
  unsure (1)..(287): unsure at all n locations; Clone ID: 700560227H1
ggtgattctgtgttttnnnttaatgggatcttgaggncaaanccccatctcnaatcaaaccccttatgtctctcttagtgcctngaattttctatagcccttctgtgcaaaatttgcatcccttaattcttgtagaattgatgtctggtttggtacaatcagatttcctcaccttcaacagcaaggggccaattcaccaaacataaacatgagnagcaattttgaggctgaaagtcagtacttaacggagctgctagcagaacaccagaagcttgggcctttcatgc

SEQ ID NO: 4973 - DNA, 282 bp, Glycine max
  unsure (1)..(282): unsure at all n locations; Clone ID: 700560228H1
cctttgttcactcttcttctcttgcggctagggttttagcgcanttcttctagatttaaggaagatgggtaaggaaaaggttcacatcagtattgtggtcattggccatgtcgactctgggaaatccactaccactggtcacctgatttacaagcttggaggcattgacaagcgtgttattgagaggtttgagaaggaagctgctgagatgaacaagaggtctttcaagtatgcctgggtgctggacaaacttaaggctgagcgtgaaagaggaatcaccat

SEQ ID NO: 4974 - DNA, 284 bp, Glycine max
  Clone ID: 700560230H1
gagcaatttgagatgacgggtttggatcctgagtataataggttgttcaatgagggcatggtgtgcactgctagggttgtgtccaaggctgtgatcactggctacaaagatgggttcaaccagattaagtccttggttgatgttggaggtggcattggagggtctctttcggagattgttagggcttatcctcatatcaatgccatcaactttgacttgcctcatgtggttgccactgctcctaagttcgatgggatcacccatgttggaggtgacatgttcgt

SEQ ID NO: 4975 - DNA, 287 bp, Glycine max
  Clone ID: 700560231H1
gcaagggcaagtggacaaagacaatgcctttgtgaacgagctggaatcactctcaagactccaccacaagaacctggtccggttgttggggttctatgaagacagcaaagaacgcattttggtgtacgattacatggacaatgggagcctgagtgatcatctccacaagctccaaagttcagctctcatgtcatgggcagtgagaatcaaggtggctctagatgctgcaaggggcatagagtacttgcaccaatacgccactccaccaatcattcaccgtgacatta

SEQ ID NO: 4976 - DNA, 291 bp, Glycine max
  Clone ID: 700560232H1
tcgttatccttctttttttctccttgaactcgaatattcactatggcagatgaggtggttctgctagatttctggccaagtccatttgggatgagggtcaggattgcacttgctgaaaagggtatcaaatatgagtccaaagaagaggacttgcagaacaagagccctttgctcctcaaaatgaacccggttcacaagaaaatcccggttctcatccacaatggcaaacccatttgtgaatctctcgttgctgttcagtacattgaggaggtctggaatgacagaaatccc

SEQ ID NO: 4977 - DNA, 291 bp, Glycine max
  unsure (1)..(291): unsure at all n locations; Clone ID: 700560233H1
gtggttttcatcgtcttccttctcttatatttcttttttttttngtcttcgccgcacgccgaaacaatggccggaaaaggagagggtccngctatcggaatcgatctcggaaccacctactctntgtcggtgtgtggcaacatgnccganttgaaatcatcgccaacgaccaagggaacagaacgacgccgtcttacgtcggnttcactgataccgagcgtctcatcggtgatgcggctaagaaccaagtcgccatgaaccccatcaacaccgtcttcgatgccaagaggt

SEQ ID NO: 4978 - DNA, 288 bp, Glycine max
  Clone ID: 700560234H1
aaaaccctgaagaaagacacagccattgtttgtttactttccattgattgagcgaaagctttgttttttctgcgatcattttccattgggtggaagaaagtctcaacctttagtcgaaagagcaaggatctgagtgagtgagcgatcatgtgtggtggtgcgattatctccgacttcattccagcgggtcccgccggcggggcgcaggcgtgaccgccgacatcctgtggccgaatttgaggaagcggttctcgaagtcgctgctggacgatgatttcgaggcagggt

SEQ ID NO: 4979 - DNA, 287 bp, Glycine max
  unsure (1)..(287): unsure at all n locations; Clone ID: 700560235H1
ggagaattatgaattgggtttgcctgtaattaaaaaagctggtgttgaccacaaaattgaattcagagaaggtcctgctctaccagttcttgatgaaatgattaaagatgagaagaaccatggaagctatgacttcatctttgttgatgcggacaaggacaactacctcaacnnccacaagaggttgatagagcttgtaaaagttgggggcgtgatcgggtacgacaacaccctatggaacggatctgtggtggcaccccctgatgctcctcttaggaagtatgtta

SEQ ID NO: 4980 - DNA, 286 bp, Glycine max
  Clone ID: 700560238H1
gccgcagcagcctcaggaggagaataaggatgtctcacaggaagttcgagcacccaaggcacgggtcactgggatttctccccaggaagcgtgctgctcgtcacaggggaaaagtgaaggcattccccaaggatgacccatccaaggcacccaagctcactgcattcttgggttacaaggctggtatgactcacattgttagagaggtcgagaagccaggatcaaagcttcacaagaaggaaacatgtgagcctgttacaattattgagacccctccaatggttat

SEQ ID NO: 4981 - DNA, 287 bp, Glycine max
  Clone ID: 700560239H1
gggctccccaaaccatttccattcactaccacaccacccgcttcttacctcaacccgatgtcttcattcgcacttcccacggaacacgcattccagcccacgccggcattctggcttccatgtcccctgtttttgacaactttatagatcgcccacgtaagcatcggagctccgagagaattatccaaatccacggcgtcccctgcgacgccgtcaccgccttcgtcggattcctctactcctccaggtgcacggaggaggagatggacaagtacgggatgcacctt

SEQ ID NO: 4982 - DNA, 288 bp, Glycine max
  unsure (1)..(288): unsure at all n locations; Clone ID: 700560240H1
tgtttcgtgcaaaaacaagttgtctctctacactccctcattttctctctctagctttttagagagagaaagatcatatcccnnnnnnnnnnnnnnnnnngtctgaaaacatggagaagaagagatttggtgtgttgatgtgcgcagaggattcagagtacgtgaagaaagtntacggaggatattctggagttttcgtgagaatgctggcggaggagggagagacatgggacgtgtacaaggtggcgtgtggggattttcctgatgaagatgacttgggtctctatg

SEQ ID NO: 4983 - DNA, 285 bp, Glycine max
  Clone ID: 700560241H1
gtttcgttccaaacaaaacccatcaaagtctttctccctcagtgatcatatattcattcagttctatacaaaatcctcaaaaactcttcctctctgccatgaccatggaatacagaaccttagaactcaacatcatatccgcaaaggacatcaagaatgttaatctcttctccaagatggacgtatacgccgccgtttcgctctccggtgaccctctccaccctcagggcgccaccacccacgtccacaaagacgccggcagcaaccccacgtggaataccccgt

SEQ ID NO: 4984 - DNA, 279 bp, Glycine max
  unsure (1)..(279): unsure at all n locations; Clone ID: 700560242H1
cttacanccagggcaggactttccatgagcattgggagcattttggctggtttactactggcaganactgaattttccttacaggttgaatctgatattgctccatatcgtggccttcttttggggntcttctttatgacggttggaatgtcaattgatccaanacttcttgtttcaaactttncagtcatcatgggcgcactaggnctcttaatatgcggaaagactatcttggtttgtntgatgggtagaagtttgggantctctcatttctgccat

SEQ ID NO: 4985 - DNA, 188 bp, Glycine max
  unsure (1)..(188): unsure at all n locations; Clone ID: 700560243H1
ctcatttcatttntcacacttccaacaatggngaaaccttcnaatacatcatcctcggtggaggagnttccgctggttatgcggcganggagtttgccaaacagggcgttaagccaggggagttggctatcattttcgaaagaagcggtagcaccttatgaacgtcctgctctgagcaaggcttacct

SEQ ID NO: 4986 - DNA, 272 bp, Glycine max
  Clone ID: 700560244H1
tggatacttcggctaagagtaccgggtcgggtgggaagaagcgtggacccgctccgtatagaatatttaacctggggaatacttcgccggttactgttcctactcttgtgagtatattggagcggcatttgaaggtgaaggcgaagaggaatattgtggacatgcctggaaacggtgacgttccttttactcacgcgaatattagttcggcccggagagagctcgggtacaagcccacgaccgatttgcaaaccgggttgaagaagttcgtc

SEQ ID NO: 4987 - DNA, 283 bp, Glycine max
  unsure (1)..(283): unsure at all n locations; Clone ID: 700560246H1
gagatgttagttcaggagaaatggaaaattagaaganaagatattgatacaacaatttngaagtttagaggantttgtcaaatcagcagctcatgctatggaagggagtgcatattctgcaaatgatattactccttccagctttattgaggcagcaatccaagtcgctgattgtggatatgaagatggcacttggtggggtanacagntggggtggttgtatggatcactcacagaagatgtgctaactgggttgagtatgnaaagaagaggttggagatcc

SEQ ID NO: 4988 - DNA, 286 bp, Glycine max
  Clone ID: 700560247H1
ttgagaactaagaagaaggaaatggcttcctcaatgatctcctccccagctgttaccaccgtcaaccgtgccggtgccggcatggttgctccattcaccggcctcaaatccatggctggcttccccacgaggaagaccaacaatgacattacctccattgctagcaacggtggaagagtacaatgcatgcaggtgtggccaccaattggcaagaagaagttcgagactctttcctacttgccagacctcgatgatgcccaattggcaaaggaagtcgaataccttc

SEQ ID NO: 4989 - DNA, 289 bp, Glycine max
  unsure (1)..(289): unsure at all n locations; Clone ID: 700560249H1
ggagaggataaggctttgcatttcatttgagaganagagcgtcttacctttccattatcaaaatggctgtttcggctatcacaggagcgaggctaaccctagggatagggttggcgatacctctttcctctcccacgcgctctcgaaccgtcgcaatggccgtatccgtcgaccccaagaccgacaacaaactcactcttaccaagtccgaggaagctttcgctgctgccaaggagctgatgcctggaggtgtcaactccccagttcgtgccttcaaatccgtgggtgg

SEQ ID NO: 4990 - DNA, 285 bp, Glycine max
  Clone ID: 700560250H1
ctttacccttgaatcatccccagcaatcaatgatctcataggttgtgattctccttcctatgctagtgtatcatccaataggagtcctttttctccacaagcttctcattcagaccagcatcagtcatcagacaacacctatggatcaccaacaagtgcacactctagatatgatgatgacggctacgaattgaagaacaagctagagaactcgagatttcgttgttggggcctgattcagacattgttgatagttggcactgctcctacaagggtggccgccac

SEQ ID NO: 4991 - DNA, 284 bp, Glycine max
  Clone ID: 700560251H1
ggctttggaagaccttggatttttatattgagcttacttggacttacaccacttgctgaacgtgtgagcttcatcacagaacaagttgccttttacactggtcccacagtcggaggacttctgaatgctacatgtgggaatgttactgagctcataatagcaatatttgcccttagcagtaacaaaattgctgtggtcaagtattctctgttgggttctattctttcaaaccttcttctggttcttgggacctctctattatgtggtggcattgcaaaccttaa

SEQ ID NO: 4992 - DNA, 284 bp, Glycine max
  Clone ID: 700560252H1
atggaatccaatagtcggcgacgctttcactctctccggcgacgatgaactcatcgccgacgaaatgagtttgcgccggtttcttctctctcctcgttccgtgagttccttcctctcactccttctccgttctccggtcgccggaaaatttatccggtgttagcgatacggaaaactcatcgcgattccgttttcttcttcgcttcgttttctacttctctttatctttcacttacattacctctctcattcggttgtttccgatcggatccatttcgccgtcg

SEQ ID NO: 4993 - DNA, 285 bp, Glycine max
  unsure (1)..(285): unsure at all n locations; Clone ID: 700560253H1
tgccactcttccatctttcccttgtcccagattcnctccactcattgcaatttcttcgatccgctttctaaattccacacccctccgttccactgcttcgccgcgacaagttacaagaatggcttcgaagaatgctcaacaagacacgcgcttagccagaatcgcctctgcgatccgagtcatccccgactttcctaagccaggaattttgtttcaggacataaccacgctgcttcttgatacaaaggctttcaaagacaccgttgacttgtttgttgancttcc

SEQ ID NO: 4994 - DNA, 79 bp, Glycine max
  Clone ID: 700560254H1
gtagactcttgttttatgtccaagtagattttcctcgtataaatggaaattcactatcatataaatccgttattgcggc

SEQ ID NO: 4995 - DNA, 284 bp, Glycine max
  unsure (1)..(284): unsure at all n locations; Clone ID: 700560255H1
tcatactgatcanttccttgcctattgcacattcttcatcacttcattcaacatttctctctcccttagctagtttttaccaatggctgctgcggttagtgctgcagtctcttttccatccaccaagtctacctctctcccaagcaggacctccatcattaccccagagagagttgtattcaagaaggcttcattgcaatacagagatgtttgtagcagtggaagggtagtttccatcagagctcaagtcaccactgaggctccagccaaggttgaaaaagagt

SEQ ID NO: 4996 - DNA, 282 bp, Glycine max
  Clone ID: 700560257H1
ggtttttgtgactgtgctccacaaccgagtcgccatggcgtcgcaggagagtatcgaaaagatgcaggcacggcagaattaccggaatttatggcacaccgatctcatgagatccattcaggccgatactccttattgttgcctcgcgttgtggtgtgcaccatgtgtgtcttaccttcttcgcaaacgagctctctatgatgatatgtcaaggtacacatgttgtgctggctacatgccttgcagtggtaggtgtggagaaagtaaatgtcctgaattttg

SEQ ID NO: 4997 - DNA, 281 bp, Glycine max
  Clone ID: 700560258H1
ctgcatcttcctagatgatgactattctgtcaagattgcaggatttggtctgatcaactccaatttttactatggttctcacttacacaagaactatgaagcatttgacatctgcaaaaatgatgtttacgatatgggtgtgttgcttcttgagattatctcaggctcaaatcagttggattcaccaactttggctttacagcatgtaagggctggaaaatttgaagaaattttggacccatttctttgctatgatgaacaaccacattaccgccaagagc

SEQ ID NO: 4998 - DNA, 281 bp, Glycine max
  Clone ID: 700560259H1
catttccaatcccacagctcctaccatctcacaccaaccactccttaacttgtttcagtagtaacactaacactctgccgttgtcatcctcactgttgcgccgtcgccggagtctcgactctctccgatgctcggcgtcgtcggagaagcagccccacgacgacgcgctggagctccctctcttccctctccctttggtcctcttccccggtgcgatcctccccctccagatcttcgagttccgctaccgcatcatgatgcacacgctcctccataccgac

SEQ ID NO: 4999 - DNA, 281 bp, Glycine max
  Clone ID: 700560260H1
aggatttcaagctcgccgataccgtgattaggggtttgttgaagtattggccggttaccaattgccagaaggaggttctcttccttggagaacttgaggaggtgctggaggccacgcaagccgcggagtttcaacgatgcatgattccgctttttagacagatttcacgctgcctcaatagctctcactttcaggttgcagaacgagccctcttcttgtggaataacgagcatattgtgagcttaattgcccaaaacaggactgtgatactaccaataata

SEQ ID NO: 5000 - DNA, 94 bp, Glycine max
  Clone ID: 700560262H1
tggaaaggctccaaggacccctcaattcctgtttctttggagaccctttggaagtgaattgtttggaccaagtttctggtggatgaagaaagcc

SEQ ID NO: 5001 - DNA, 288 bp, Glycine max
  Clone ID: 700560264H1
tggattgtatctgtcgaatctgcaactctgctggaagaggaagaaattgaggttccagtttccaaagaaccagcaggagaaaataccaagatggaaactgatgaagctcctgccaatgttgctgcacctcctagcaccaatgacaatgatgttaacatgcaagatgctaattccaaggcaactgctgatgcccctgggtccgaaaatgggacccctgaggcaggagataagcctgtgcaaatggatactgataccaaggttgaggctccaaagaaaaaagttaagaaa

SEQ ID NO: 5002 - DNA, 288 bp, Glycine max
  unsure (1)..(288): unsure at all n locations; Clone ID: 700560265H1
gtttagttatctactcttttctgcatgtttgttctctcaacgactcctccgcgaaagagtattattcaatattttggttgggttgaatcccggggttgaagcgttncagacatcacggctattctaagagtgtctcgctccctcattcatgtccgatctgtacgacggaggacgggtagttgcgtaactgccgttaacccttcgccgcacggtgggcgtggtgctttgccttctgaaggtggtagcccttcagacttgctcttcctcgctggtggtggtttcttctag

SEQ ID NO: 5003 - DNA, 283 bp, Glycine max
  Clone ID: 700560266H1
aacgaatcgaaaaaagaaagatcatggcgatggcaaacttggctcgacggaagggttacgccgtcgttttgtcgtcgaggtcgtcgctttgtctgacaaggtggagggggttcgcgtccggatctgacgaaaacgacgtcgtggtcatcggcggcggtcccggcggctacgtggcggccattaaagcggcgcactgggtctgaaaaccacttgcatcgaaaaacgtggcatctcggcggtacctgcctcaacgtcggatgcatcccttccaaggcattttgca

SEQ ID NO: 5004 - DNA, 284 bp, Glycine max
  Clone ID: 700560267H1
gtcatgatatcaaaaacggcgattctgatcctgctcacgtgccagcaaccagtgcaattagcaataatcagtttgaacttgaagatgctaagactgtttcgcatcaggaactgatcactccaaagcctaaagaaaagaatgtcagagaaatgaagaatgtgctaaatgataccgagatgactgattatgatgagtatggcacgcctctggatcgagaaacatttatgaaagagcttgagactttctacagagagcggtcctggaatttaagcctcctaagtttt

SEQ ID NO: 5005 - DNA, 284 bp, Glycine max
  unsure (1)..(284): unsure at all n locations; Clone ID: 700560268H1
ggattattcatcatggattaacacttccttggatctcaacattaatctccatagggttcacgaagaacttcccgtaagtataaacgtacatatagcgtccaagatcttctgtggaatgtttccctcagaataataattaattctttcttgtgtcctgattnnnnnnnnnnnnnnnnnnnnnngtgtgttcatttcagaaaaagcaggtggaaaacaattgntnctcattggatttggaggtgaagaaatcttctgtaaaacaagaggttagttctgtctgccaa

SEQ ID NO: 5006 - DNA, 282 bp, Glycine max
  Clone ID: 700560269H1
gcatctcagaggccaattctttcgccgcttcttctctctttccaacgcttccccctgtggtgttctcgtgttgctggtaacaatatggttgttgacgctttgaatgaggatttgagaatcaacggagcagttgaaccgttgcctgaggactttgatgcaacagctgtaatcatagatcccgtgcctttggcagttgtagacaatggcattgtcaaggaggaggcgcagatcattaaaggaaaagagaaaagagaaatagtactgggaagaaatattcatacc

SEQ ID NO: 5007 - DNA, 281 bp, Glycine max
  Clone ID: 700560270H1
ctccttctcccgccgcaactcacactgtcttccttctctagggtttttagctcctccaaattcttcgcccaacatggttcttcaaaatgatattgatttgctaaatcccccggctgagcttgagaagaggaaacacaagctcaagcgtcttgttcagtcaccaaactctttcttcatggatgttaagtgccagggttgcttcaacataaccactgtctttagccactctcagactgttgttgtatgcggaaatgccagaccgtcttgtgccagccgacagg

SEQ ID NO: 5008 - DNA, 274 bp, Glycine max
  Clone ID: 700560271H1
gttcgtttgttcggtggtgaattcctatccacacgtctcaccggaaacatgtcagcggtggttgctggttcctcctcttcattctctgccaccttcacccccataaggagcccctccttaaaaaactctcaactctctcattccaaggcactcacttcacctcaatgccagaaaacatctttacaagggctctcacttcatgaagccaaaaggggtgtttcagaatccttcctagttgagaacaacaatggttcctccattgctggaaggagac

SEQ ID NO: 5009 - DNA, 287 bp, Glycine max
  unsure (1)..(287): unsure at all n locations; Clone ID: 700560272H1
ggaagatattgcgcagatggttcaagaggctnagaagtacaagtntgnggatgangagnacnagnagaaggttgaggccannaacgctttggaanactatgcataccaacatgaggaacaccgtgaaggatgacaagattggtgagaaacttgacccggctgacaagaagaggantgaggatgcaattgagcaagcaatccagtggttagacagcaaccagcttgnanangcagatgantttgaggacanaatgaaggaattgganagcatctgcaatccaatcatt

SEQ ID NO: 5010 - DNA, 280 bp, Glycine max
  Clone ID: 700560273H1
cggaaacttcgcttgatagattggggtcttgctgaattttatcatcctggaaaggaatacaatgttcgtgtggcttcaagatactttaagggccctgaacttctagttgatttacaagactatgactactcattagacatgtggagtcttggctgcatgtttgctggaatgatatttcgcaaggaaccttttttttatggtcacgacaaccatgatcagcttgtcaaaatagctaaggtgcttgggacagatgaactgaatgcatatctgaataagtatc

SEQ ID NO: 5011 - DNA, 280 bp, Glycine max
  unsure (1)..(280): unsure at all n locations; Clone ID: 700560274H1
ggcagcgtcactacaagcagcagctactttcatgcaacccaccaagttgagcnggancaacactttgcagcncaagtctactcagtccatttccaaggctttggttnggaacctgttggagcnaaaaaggtcacatgctcccttcaggctgatctnaangacttggctcacaagtgtgttgatgctaccaaaattgnaggattcgcccttgccanctctgncctcgttgtctctggggcaagtgctgaaggtgttccagagangctaaccttcgacgaga

SEQ ID NO: 5012 - DNA, 235 bp, Glycine max
  unsure (1)..(235): unsure at all n locations; Clone ID: 700560276H1
acccttctcttctccttcttctccttcctcgtcttcatctccaggatgaagccctggtgtaactgcgatctttgcaagagctacttgacggtgagttggctgaaaaagttccccaatctctgcgactggtacactcatctcttgcgtaaatccccaaccggcaccatccacgttcacgtgctggggaacaccatcacctcgaatccccacaacgtggagcanattctcaagacga

SEQ ID NO: 5013 - DNA, 281 bp, Glycine max
  Clone ID: 700560278H1
ctgatggaaacattcggatttgggaaagattatactctgaggggtaaacaaaaacttgtcactgcattctcttcaattcatggtcataaacctggtgtgaggaatctgaatgcagttgttgattggcaacaacaatgtggttatctgtatgcatcgggtgagatatcatctattatgctatgggatgttgataaagagcagcttgtcaattctaaatcttcatcatcagattgcagtgtctcagcattggctgcatctcaagttcatgggggacaatttac

SEQ ID NO: 5014 - DNA, 290 bp, Glycine max
  unsure (1)..(290): unsure at all n locations; Clone ID: 700560279H1
ttcctctatccctgactttatccccaaccatcttccacttcctcatctcttnccttttccaccatttcttctcatncctcacattgttctgcctccctcttgcttccactgnctcttactgatngtnaggatgtcctcaacatatgtnctgatcctccttgccactcatcgaatgcagactagatgaagtctagcatctacaaacctcagccttnatntactctcttgtcacacgggaaccctcttctgtttagaaagcncnatattcagctcttcttnccaattagtac

SEQ ID NO: 5015 - DNA, 285 bp, Glycine max
  Clone ID: 700560281H1
gttgtaactcgttcttcttcttttgttgttctgtgtttgtgtttgttttttctctcacctgaaaatgtcttgctgcggtggtaactgtggttgcggaagctcctgcaagtgcggcaacggctgcggaggctgcaagatgtacccagacttgagctacactgagtcaaccaccaccgagaccttggtcatgggagtggcacctgttaaggctcaatttgagggtgctgaaatgggtgtgcccgctgagaacgatggctgcaaatgtggaccaaactgctcctgcaa

SEQ ID NO: 5016 - DNA, 285 bp, Glycine max
  Clone ID: 700560282H1
aaaacactatagcaatagaaacatttgcttttgaaaaacccctcactcttcatcactacactagctagccacatacaatgtcgaccaaatttaaggtgtttcgtgaattcacaagcgatgactcattcctaaaccaagttatccctgaaaacatcaccgaattccaagtgtctctgtccctcgctagagactacgatggcaacaactcaaccaacggaaagttcattccttactgggacactgaaaaggtcactcccgaagtgataaaaaaattcaagaaaaaat

SEQ ID NO: 5017 - DNA, 284 bp, Glycine max
  Clone ID: 700560283H1
gccgggattgtaattggagtttgcgatggacctatgctggcaaaaaaacagtttgctgaactgatacagcccattgaggaaaggataaataatgtcaaaactttcataaagtctatcaagccggagttggaagtgcaagctgtgccaatcacagatccatttggcccttccattacagatgagaacttggaggctgtgattgtaagcaaagagacattaccgggaggattggctataaacagaagaagagctgaaagagatctttcacagttgaagattgaagt

SEQ ID NO: 5018 - DNA, 257 bp, Glycine max
  unsure (1)..(257): unsure at all n locations; Clone ID: 700560285H1
ttaaatatagcatagatgatactntcttatgatggctaagacagaagtgatgttgaagagaggttattgtttcattggatgttgtctctgtcagggattcagttagtgcacttgcttggctaacttgctaattgaggttgctgctttgtatgatttgaagagtttcagtaaggagtgtgttctaacaaaanatctttagttgagccaattttaagctatgatcaagcagatattaaataggctccctcggaagccct

SEQ ID NO: 5019 - DNA, 282 bp, Glycine max
  unsure (1)..(282): unsure at all n locations; Clone ID: 700560286H1
cagctccccaagaaagtgcaggtgatgatgttggagctantactgagaacattgacagcgatactagtttgagtggacaaagtgacgagttgtctcctgagggaagcttgactacagatgcaacagaagaaactgatcaggtnccttctcctgaaagttctgccactgaagtagtaaaaacctccattgatgatcctgaagaagaagcaaaaaaacaaactccggctacagagaatgaaaattcttttacctcacaagttgaagacaaagaggttgctnggg

SEQ ID NO: 5020 - DNA, 282 bp, Glycine max
  Clone ID: 700560287H1
gagtgattgagtcacttttggaaaaagttgacattcttcttcttggtggaggaatgatcttcacattttacaaggcacaaggtctttcagtgggttcatcccttgtagaagaagataagttggatcttgctacatcactacttgcaaaagccaaggaaaagggggtgtctctcttgttaccaagtgatgtggtgattgcagacaaatttgcccccgatgcaaacagcaaggtcgtgccagcatctgccatccctgatggctggatgggattggatattggtc

SEQ ID NO: 5021 - DNA, 283 bp, Glycine max
  unsure (1)..(283): unsure at all n locations; Clone ID: 700560288H1
ggccatcgcaacagagactcagcctcaacaacacaaggattcttcggaggtttcgggttcagctgcgganaaagaaggtggacgcttaacgatttcgatatcggaaagcctcttggaaggggaaaattcggtcacgtctatttggccagagagaagactagtaatcatattgttgctttgaaagtactcttcaagagtcaattgcaacaatcccaagttgtgcatcaacttcgacgtgaagttgaaatacagagtcatctccgacatccccacattttgcgcc

SEQ ID NO: 5022 - DNA, 280 bp, Glycine max
  Clone ID: 700560290H1
gggaactcgggaactctaattaccccgtcgtgcttgtgcagattccaatgttcaatgaaaaagaggtgtacaaggtgtcgattggagcagcttgcaatctttcatggcctgtggatcgtctcgtgatccaagtgctcgatgattctactgaccctaccatcaagcaaatggtggagatggaatgcaatagatgggcaagtaagggcataaacatagtgtaccaaatcagagaaacaagaggagggtacaaagcgggtgctctaaaagaaggcctaaaacg

SEQ ID NO: 5023 - DNA, 279 bp, Glycine max
  Clone ID: 700560291H1
ccactctctttctctagtcctgttatttctcagcgcgtaaagcatggctttgttggtggagaaaaccacgagtggtcgcgagtacaaggtcaaggacctttcccaggccgacttcggccgcctcgagatcgagctggccgaggttgagatgcccggcctcatggcctgtcggaccgagttcggcccctcccagcccttcaagggggcccgcatcaccggctccctccacatgaccatccagaccgccgttctcattgagaccctcaccccttggcgccg

SEQ ID NO: 5024 - DNA, 280 bp, Glycine max
  Clone ID: 700560292H1
gggcagcgtcactacaagcagcagctactttcatgcaacccaccaagttgagcaggagcaacactttgcagcaaaagtctactcagtccatttccaaggcttttggtttggaacctgttggagctaaaaaggtcacatgctcccttcaggctgatcttaaggacttggctcacaagtgtgttgatgctaccaaaattgcaggattcgcccttgccacctctgccctcgttgtctctggggcaagtgctgaaggtgttccaaagaggctaaccttcgacga

SEQ ID NO: 5025 - DNA, 94 bp, Glycine max
  unsure (1)..(94): unsure at all n locations; Clone ID: 700560293H1
gcctttgtattatggacagagaatgcaacttgcggtaanactncntatgtncactgtaaaggctggtncgggggnggagtacaacaattgtgct

SEQ ID NO: 5026 - DNA, 285 bp, Glycine max
  unsure (1)..(285): unsure at all n locations; Clone ID: 700560294H1
gtgtgagtgagtgagtccttggtccgaagcaatgcaagaagaagaagcatagcagagaagcagcaatgacaagagcaatgctgcctggtgttattccctcaagacaacaaagccaagttcaacttcccttctccttctaagtctcttgtctccaaagcacaatccactatctnnatctgcctccttctctttttcacaactctcctcctttttactctctccnncctcccaaannnccctcanacccctnnnactnaccctcctaaacncancccccaccanctg

SEQ ID NO: 5027 - DNA, 283 bp, Glycine max
  Clone ID: 700560295H1
ttcaaggccgggtcccagatcttcagcgagggtgggctcgactacttgggcaacccaagcctgatccacgcccagagcatcctcgccatctgggccacacaagttatcctaatgggtgccgttgaaggttaccgtattgctggtggccccctcggtgaggtcactgacccaatctacccaggtggcagcttcgacccattgggccttgctgatgacccagaggcttttgctgagcttaaggtgaaggaactcaagaacggacgattggccatgttctctatgt

SEQ ID NO: 5028 - DNA, 287 bp, Glycine max
  unsure (1)..(287): unsure at all n locations; Clone ID: 700560296H1
aatatggcaatgttcacgtaccacgttgaaacggttcaatcatggttggcactgagcagacttcacatactgatccacttagtggcagtgttgtcgctgtgttaactaccgcataactcacttgttactggaacctccaacagcgccatggcttctgntgaccgtagcggagtttcttctctcggtgctctggttcttcaaccaagccttccggtggcggccggtgtcgcggaggtcatgacggagaagctgccgagggntgagaagctgccggggcttgacatctt

SEQ ID NO: 5029 - DNA, 291 bp, Glycine max
  Clone ID: 700560301H1
gcaaacttgggagaggtgggtttcgacgattacctctttgacatcaacaacagacacagagttctcagttacgtttgagtgggatgagagcatgggtgttcctggggcattcataatccgaaacaatcaccatagccagttctacctcaagacactgaccattgaagacattccagggcatgatggtcctgttaattttgtctgcaattcttgggtctaccctgctcatcgttacgcccatgatcgtgtcttcttcgccaacaaggcttatcttccatgtcatacacctga

SEQ ID NO: 5030 - DNA, 286 bp, Glycine max
  Clone ID: 700560302H1
gaggcacgggtcaatgtacccgatgaacggttcgagtggctttgccaattattcaagccaaaaagtgaggtcctcggctttcttagaaatccatgacatagctggattggtccgaggtgctcatcaggggcaaggattggggaatagttttttatctcacatccgtgctgtagatggcattttccatgttttacgtgcatttgaggatccggacattattcacgttgatgatactgttgacccagtcagggatttagaggtcattactgaagaatgcggctgaagg

SEQ ID NO: 5031 - DNA, 285 bp, Glycine max
  Clone ID: 700560303H1
actatccataacatagccacttcacactcactcactcttgttgccttcatggccaagccagtgtccattgaggtatggaacccaagtggcaaatacagagttgtcagcaccaaaccaatgcctggaactcgttggatcaatcttctcattcaaaatgatgttcgccttgaaatatgtaccgagaagaaaacgattttgtcagttgaagacatcattgctttgattggtgataagtgcgatggagttattggacagttgactgaagactggggagaagagttgttc

SEQ ID NO: 5032 - DNA, 283 bp, Glycine max
  Clone ID: 700560304H1
atcctgcaagaaacaaaaggaagacatcaagactaaaatttcaagagtttatatgaggacagaagcatctgataaaagccttattgtgaaagatggatatcaatggaggaaatatggacaaaaggtgaccagggataacccttctccaagagcatatttcaagtgctcttttgctccaagctgcccggtcaaaaagaaggtgcaaagaagtgtggatgatcaatctgttctggttgcaacttatgaaggagagcacaatcatcctcaccctctcaaatggagg

SEQ ID NO: 5033 - DNA, 282 bp, Glycine max
  unsure (1)..(282): unsure at all n locations; Clone ID: 700560305H1
tatctttcatcttttcagcaggccattctctgaaagcacctcctgatccagttaaaagatattaagcttgctgatgcattaaagcatcccatatggagtttggggagaaaaataactattgactctgctacccttttcaataagggtctagaagtaattgaagcacattacttgtntggngcaagctataacaatctcaatatcgtcatagcttgctccaaacaagtaatgacgatattgagattgttattcatcctcaatctatcatacattcctggttga

SEQ ID NO: 5034 - DNA, 285 bp, Glycine max
  unsure (1)..(285): unsure at all n locations; Clone ID: 700560306H1
aaaatagaaaaataaacaaaagaaaaaagggaacganaaaaaagaagataaganaaaaaataganaaaganangaaaaaanacanaagnnnnaaaggaatgaanaaanatctacattgtctgaccnttggactctgaaggagagcccattaggtcaagcgaaaagcatagtgcataaaaggggnaaggangaaagtctgtgcaattaatgcanataaaagncgcatgagtcccaaggacatggaattgatcaacgaaagggtgacatttggcattgccatcagag

SEQ ID NO: 5035 - DNA, 288 bp, Glycine max
  unsure (1)..(288): unsure at all n locations; Clone ID: 700560308H1
tgtttctctgtcttcattttagtttttacggtcagaagaatgtccagctcatcggaatatttggtattttccggccaccacccggcgaactctccggcggaaaantccactttctctcagacttgtagtctattgagccaatacatcaaggaaaagggtaccttcggagaccttaccctcgggatgacttgcncgccgaaacaaacggttcccctgagacatcgtgtcactctgcaacaaccatggagttgtttcccacgatcatcacgcaacggaacccaactactg

SEQ ID NO: 5036 - DNA, 297 bp, Glycine max
  unsure (1)..(297): unsure at all n locations; Clone ID: 700560309H1
gatgaattccctttaattttgtttcagcggcgatcgtgtctgtttcattattccgagcnccagtccccaaactcgtttccatctccagagcccagagnacaaaccttatactctcgtgatccgttcctctggccacctttctaataagctaaaagtttcagccctcaaaagcaacgaaacaaagccaaagcagttctcactgtgtcaaaacggatggctccccgctttcccccagttcttgttgcttcaatgtctaattttatatttgggtatcacattggagtcatgaatggtcct

SEQ ID NO: 5037 - DNA, 293 bp, Glycine max
  unsure (1)..(293): unsure at all n locations; Clone ID: 700560310H1
caaacgacttcatgcaagttttcacgagtgggcaagggcagatggntgagagattttggattcagcaaaaanattggncaagttgccattggtggacctggtgganatccattcttgggtcaacagatgtcatcgcaaaaggattactccatggcaactgcggatgtagtggatgcggaagtgagggaactggtagagagagctattctagggcaacacatattatctcaactcacattgatatcctcacaagcttgctcaacttctcataganaaagaaactgtggatggtg

SEQ ID NO: 5038 - DNA, 279 bp, Glycine max
  Clone ID: 700560311H1
aatttgcattattcagtaatggatttcaagatgcttaggtcttttgttgagaagattgaaaagggtctatcactaattgctcccaaaaagccaggactcaactacttcaatgaaaatcaagtggaaactacaacgaatgttgtgcccgaagatgttgttagtaaagggtattttgctgttgttgcaataaaagatggagaaatcaaaaggtttgttgttgagttagactacttggctaatccagcatctgggtttgttggatcaagctggagaagagta

SEQ ID NO: 5039 - DNA, 293 bp, Glycine max
  Clone ID: 700560312H1
ttgaaacaggggcattgcaaatcagccagtggccgtacctattccagcagacgactatgaatttcaatattatacatcaggtgtattcaaagggaaatgcggtacagaattaaatcatgctctcctgcttgtggggtatggtacagaaaaagatggagattattggatagcaaagaattcatatagtgataaatggggagagaatggctatatcagaatacaaagaaaactgagcacttgtaaatttggaaacgggggttactatcccattataaaagtcaccgatcaacaag

SEQ ID NO: 5040 - DNA, 279 bp, Glycine max
  unsure (1)..(279): unsure at all n locations; Clone ID: 700560313H1
gtggtacgcttcagatgacatttctccananagggtntgatgagactcgtcgacttgggccttagaagtgagacagagcagtccgtcatgcttctccagctggtgaaactggaatgctgttgtggactctgtggttccaggtggtccgggttataaacatttggnaccgggtgatgtacttgttcgtgtcaatggagaagtcattactcaattcctgaaactggagactctacttgatgacagtgtaaataagaatatgaatacnaatgaaagggtggc

SEQ ID NO: 5041 - DNA, 297 bp, Glycine max
  unsure (1)..(297): unsure at all n locations; Clone ID: 700560314H1
ctgaacttttccctcgaaacacaaacacacaaacaacatagttnagcccttagccttaataaccttagcagcgtcgacaatggccggtgatgacctcgccggagaccacacgccggagcttctgtgcctggtccacgaaatcgccggaatgtgctcggcggggtcctcctccggcgccgacgccatgttccgcaaggactgcaccgatctggttcgccggatctccctcctcacccacctcttcgaggagattaaggaactcaaaaacaacaacgatgtcggtggttccgcttcttc

SEQ ID NO: 5042 - DNA, 299 bp, Glycine max
  unsure (1)..(299): unsure at all n locations; Clone ID: 700560315H1
cttctttccaaatcccaactactantcanactcactgcagatcacaatccatggctaccattgttagcatcaaggcccgccaaatctttgacagtcgtggnaatccaaccgtcgaggtggatttgacatgctccgatggtacttttgctagagctgctgtnccaagtggtgcatccactgggatttatgaggcccttgaattgagagatggaggatctgactaccttggaaagggtgtatcaanngctgttgacaatgtgaacaccattantgcccctgctttggttggcaaggacnca

SEQ ID NO: 5043 - DNA, 303 bp, Glycine max
  Clone ID: 700560316H1
gtttacatccctgcttctcctttttggtttatgagttcctagagggaggtagcttggataaattactaaacgatgatacgcatgcaacactgtttgattgggaaaggagggtgaaggttgttaaaggtgtggcaaatgctttgtaccatatgcatcatggttgctttcctcctattgttcatcgagacatatcaagcaagaatgttctatagatttggattatgaagcccgagtctctgactttggaacagctaaaattctgaagcctgattcacaaaatttaagctcgtttgcaggcaccta

SEQ ID NO: 5044 - DNA, 286 bp, Glycine max
  Clone ID: 700560317H1
tcttcatccaatgactatacattcattatatttttgtgtaaatagaggaaaaactcgatggaaaaatggtggtttaattctatgttgtttaataggaagttagaatacaggtgtgaattaagtaaatcaatggatagtcttggtcctattgaaaataccagtctaagggaagaccctaaaattttaaccgatatagaaaaaaaaattcacagggatttggattatttagaaatggaaggttttttttctagcgatctgaatactgtttctaagaatgatgatgatc

SEQ ID NO: 5045 - DNA, 134 bp, Glycine max
  unsure (1)..(134): unsure at all n locations; Clone ID: 700560318H1
tctcttgctctgtatcttgatttgatcattccaatcttcaatttttctatatatccatcaatccgctgagtgcaaagttctaatctttcgcctattgggttctactccttctcgcttcgnttccgatcgatcca

SEQ ID NO: 5046 - DNA, 282 bp, Glycine max
  unsure (1)..(282): unsure at all n locations; Clone ID: 700560319H1
gcatttttcagagtagaaccttcactctgctatcccccatattcctgtgtttcctttgaaaaaaaaagaagaagaaaaaacatgtctaggttttttggattcttctttgtgggtcttacgttgatgttggtcggtgtggcaaatgctatggctaactcttccaacaaatttgatcaactcttccaaccaagttgggcttttgaccactttattcatgaaanggatctctcaaactcaaacttgacaaattttccggggctggttttacttccaagagcaagt

SEQ ID NO: 5047 - DNA, 284 bp, Glycine max
  unsure (1)..(284): unsure at all n locations; Clone ID: 700560320H1
gtgttgtaattaatggcagctgcaagtagcatcatctccatctcctctgcttcactactttactccaacaacaacccaatgcctcctcaaacacaattacaaggaccatgatcatgttcatgttcnnnnnnnnnnnnnnnnnnnnnnnnnnnnnnnnnnnnnnnnnnnnnnnnnnnnnnnnnnnnnnnnnnngtttggaatcaccacaacaaccaccagggttaataatgttcctcctcgtaggtttagttgttcagcatcgtcatcttcttcctcttccactc

SEQ ID NO: 5048 - DNA, 277 bp, Glycine max
  Clone ID: 700560321H1
aaagtgtctgatacttgtacacaatctaatggtaaagatgaatctgttaggagcaatggttggaactctcagtctccaggtttgactatacaagcagatgggaataacaatgaggggcaaagtggaaattctgaaaggagggaggagtcccccaaatgtgaaatttctgtcatgatgtcccccatgtatacgcttcactgcctcaactgtattttcagagaaactgaatgagaatcctctgataaattaacagaagttcataagattgaagtaaagt

SEQ ID NO: 5049 - DNA, 285 bp, Glycine max
  unsure (1)..(285): unsure at all n locations; Clone ID: 700560323H1
gggaataggaaaacctgtgactgtggaagngatacaagtagaccctcccaaagccaccgaagttcgagttaagatgctttgtgccagtatatgctccacagacatctctagcacaaaaggattcccacataccaattttcctatagcacttggacacgaaggagttggtattatagagagtgtcggtgatcaagtaacgaatctgaaagaaggggatgtggtaattccaacatacataggcgagtgccaagaatgtgagaattgtgtttcagaaaaaaccatttg

SEQ ID NO: 5050 - DNA, 119 bp, Glycine max
  Clone ID: 700560324H1
cttctttgaaaggatatctcgtgttataaagttgaaccactagtgtttttttcgtatcattgatctgccgaatgtgtatttactgtacatactaactgattaatttttatttggagaac

SEQ ID NO: 5051 - DNA, 286 bp, Glycine max
  Clone ID: 700560325H1
atcctttcgttattctcttattcatccttctcttctgaataatccagatctctttctgcccttttctccgtcacgcttttcgtgaccggatctgtatggatttgatccagatctacacgccgatggtggttttggccgggtctttcatagatctggtgcgtagaggctcagatctacggtaccgaggtacaacagagaatcgatgacaagaacgcagatccgacggtagatccagccgattccgcttgttcgatcgctacagacccctgtatcggatcataagcag

SEQ ID NO: 5052 - DNA, 282 bp, Glycine max
  unsure (1)..(282): unsure at all n locations; Clone ID: 700560326H1
tgtgaaatgactncattcatatttcactatgtattggagtgaaactttttaaagaagctcaagcctttgggcatgtaaattgttttaaatgtgtcattttctctggcgtgtggggtaaaggttaatgtctgtttacctttgttgataaaaaggtatctctggaatgtaggtctccaattgctaggcagcacagtgcacatcaccaaacggtactttaggtcctagctgcataatggtatgtgaaaagtgtgcccaatggagagcaactgcaagagaatctct

SEQ ID NO: 5053 - DNA, 280 bp, Glycine max
  unsure (1)..(280): unsure at all n locations; Clone ID: 700560327H1
cgccggtggagcctacaatctcccacacaacaaaaccagntggagtattcacataataagttacccatgtatgctgctgcattcatgcttcctgccatggagggatatgataaaaaaaggcaaggtgttgacttgcttggaagagattttattgtcttggggaaactcatttatatgcttggggtctgtatgaaatctgtagccatgcatccagaagcttctatgctggctccttccctcctaaatatgttaagatccagggaggtatgccatcaccagg

SEQ ID NO: 5054 - DNA, 282 bp, Glycine max
  unsure (1)..(282): unsure at all n locations; Clone ID: 700560328H1
ttcccctatggctcgtcactccttgctcttagccctcctcctnttcgccgcagtgnccaccgccgcgatggcggtggcgcgtccgacgccgacgacatcctgatccgtcagtggtgccagatcctggcgaacgaagaggaggacaacctgctgaacgccgagcaccacttcgcgagcttcaggccaagttcgccaagacctacgccaccaaggaggagcagatcatcgcttcggcgtcttcaatccaacctccgcagagccaggtgcagccaagctcgaccc

SEQ ID NO: 5055 - DNA, 289 bp, Glycine max
  Clone ID: 700560329H1
cattagcaaaagcaagaagaactagtctaagcagaaatggcctcttcagtgatggcatctgtggccctcaaacctgcccctttcactgttgagaagtcctcagttagaggccttccctccctctcaaggaactcctcttcattcagagttgtggccagtggtggcaagaagatcaagactgacaagcctatggaattaatggtggcatggcttgagggaaggagttgatgcatctggcaggaaaggaaagggaaaggcgtttaccatttgtagacaaatacggtgctaa

SEQ ID NO: 5056 - DNA, 301 bp, Glycine max
  Clone ID: 700560331H1
aacaaatcaaagccatggccacctccaacttctctattgttctctccgtctccctagccttctttttggtgctacttaccaaggcacactcgaccgataccgtttctttcaccttcaacaagttcaacccagtccaaccaaacattatgctccaaaaagatgctagtatttcatcctctggggtgttacaactcaccaaagttggcagcaacggcgtgcccacctcgggatctctcggtcgtgccctttacgctgccccaatccagatttgggacagcgaaaccggcaaggtagccagctg

SEQ ID NO: 5057 - DNA, 304 bp, Glycine max
  unsure (1)..(304): unsure at all n locations; Clone ID: 700560332H1
gtcgtccaatccgcagaggacacttgaacatttcacaacattattccatgcagcaggtacttncacgatctacatactatttgggattggattttaatagagaaactgcacattcctcgcaatgaaagaaatatgtattctgctgttcttgtgatgccagaaacatttgacaatcgtgaaataaaagaaattctatctttagtactacgagaactctgctttggctcagcagtggtacaccaggaaggtctgcagcagtttttggaaatggattatcaacagcatgtgttgtgaatattggtgc

SEQ ID NO: 5058 - DNA, 285 bp, Glycine max
  unsure (1)..(285): unsure at all n locations; Clone ID: 700560333H1
ccaacccatgcttgatagttagtacataaatcatcacacgctcggtcaatagtttcatctggccttgtgcaattgaagaagagtggatggagattcagttagagcagcagcaggagtcatggtcggagacgtcgagcacggggagcaggagcacgcgagtnggcttcancgggcccatgagcggcccgctggtgacgcccaacaacaagaagagcagcaagaaaagcacgaggttcaaggaccaagaggaggaggacttcgtggagataacgctggactgcgcga

SEQ ID NO: 5059 - DNA, 283 bp, Glycine max
  Clone ID: 700560334H1
ccttcctcttcatcttccttcccctctctcattcaagacaggcctgtttttgctgcccctgcccccatcatcaccccaactgtgagagaggatatggcaaaggaatacgagaaagctattgaagaacttcagaaattgttgagggagaagagtgaactcaaagcgacagctgctgaaaaagtggagcagataacagcttctctagggacatcatcatctgatggcatcccatcatcagaagcctcagacaggatcaaagctggtttcattcacttcaagaagg

SEQ ID NO: 5060 - DNA, 278 bp, Glycine max
  unsure (1)..(278): unsure at all n locations; Clone ID: 700560335H1
gctgctgcggaattagagggaggagagggagagtttgagttgtgggagcgcatgggtccgggtctcacttttattatgctggcacagccatatctcaatgctgttcctatgcccattggcctcgagggtctctgcttgaaggtctgcactcactatcccactcttttcgaccattttcagagggngcttcgccaagttctccgagactccttcattcaggactggcgggacaccaagtcttggaaactgttaaggacctcgctaatcggctcagcata

SEQ ID NO: 5061 - DNA, 281 bp, Glycine max
  Clone ID: 700560336H1
acacaacgcaacacaacgcgcactctctcttttctctcttaacacaaaaaccctatcgttcttccgcggtttcgccgattctcgccatgccgaaagccaaatccgacgccaaagccgccgatagccggttgaagcgcaagggcgctggtgctggaaggaagcaatcgaagaaagctgctaaggatcctaacaagccaaagagacctccaagcgctttcttcgttttcatgtccgagttcagagagcagtttaagaaggagcatcctaacaacaaatccgtc

SEQ ID NO: 5062 - DNA, 282 bp, Glycine max
  unsure (1)..(282): unsure at all n locations; Clone ID: 700560337H1
gttccagaggaacgcagagctggacccagaaaagaggctgtacccaggtggcagttacttcgacccactgggcctggcctcagatccagagaagaaagccacccttcaattggcggagatcaagcacgcccgttctcgccatggtgggcttcttgggctttgcagtccaagctgccgccactggcaagggcccgctcaacaactgggccacccacttgagtgacccactccacacaaccatcatgnccaccttctcatcctcctcttaagaagaagcaaaag

SEQ ID NO: 5063 - DNA, 71 bp, Glycine max
  Clone ID: 700560339H1
gaataaagtttgtgaaagttaaatgtaatatttttattctcatatattgcatccctcaataatttgactgt

SEQ ID NO: 5064 - DNA, 284 bp, Glycine max
  unsure (1)..(284): unsure at all n locations; Clone ID: 700560340H1
gtatttgagccaccatactgacaattgtnagtatggacaagttacaccaaaattatcaaacagtcaatgtggactcttacctgtttctggggttatctccaacctnaagtctgagggacatggtaatgttttcacttctttgttctatgcacaatctggtattcaccctatgtcgagtccaaaacctgtctgccagaatgagagttctccctttcccacaagtacctccacccagtcctatcctganagccacaatcagatcaactacatgactgctccaatga

SEQ ID NO: 5065 - DNA, 263 bp, Glycine max
  unsure (1)..(263): unsure at all n locations; Clone ID: 700560341H1
tgaaatagataaccttgtatcatgncagttgnnctnaancngancttagagggtagaacgttgcangagcccataggnagtanngnanaaganttttcntncttgntatctnanggtaatcnggancggnattnaaanangttncccttttatcagaaatgcaagctccatctcatcaccatcaatttcaatacgacaagcaataatgcctntgactacntaatagttngaggangcacagcaggtgtctttngctgaaacct

SEQ ID NO: 5066 - DNA, 284 bp, Glycine max
  unsure (1)..(284): unsure at all n locations; Clone ID: 700560342H1
aaggtgcaanaatattaagatgataaacattggagcacttgttgtactctttgcatttctcttcctcagttgtgcctatgcacaagacacaacaacccttgtgcctgcaatcataacttttggtgactcagccgtggatgtagggaataatgactatcttcccacccttttcaaggctgattaccctccttatgggagggactttgctaaccaccaacctactgggaggttttgcaatggcaaattagctactgattttactgctgacactttgggttttaaga

SEQ ID NO: 5067 - DNA, 287 bp, Glycine max
  unsure (1)..(287): unsure at all n locations; Clone ID: 700560343H1
tcccatcgttaagcctattccgaagccatttntgattgttaaaccaattcctaatgacgaagaaaaattcaaaggtgtttttccaaaaantattcccatagttaagccaattccaaagccaattcccattgttaagcctatccctattcnnatatataagcctataccaaaatcagttcccattgtgaaaccaattcctattattaaaccaatactaaagccaaatcccattgttaagccaattccaaagctgattcccattgttaagcctatnccaaacccattaa

SEQ ID NO: 5068 - DNA, 288 bp, Glycine max
  Clone ID: 700560344H1
gacacacttccacgtcaccaccaccgtggaaggtggcgcgtgaggctgtttccggcgacctataccggcggcgctgagtggtgatcaaggaaatgggtcagaggctaagctgcgtgcaacagcagcacgaggagcatggtgtgctcttcccagcacttgcaagtggagaattggaggttgttgaggccatggtggaggaagaccccactgtgttggaacacaccactggctgtgaccgcctttctcctctgcatgtagctgctgccaatggtcggatcgaggttcttt

SEQ ID NO: 5069 - DNA, 284 bp, Glycine max
  unsure (1)..(284): unsure at all n locations; Clone ID: 700560345H1
cgtcaacganggcggcttctctcgtctcgtctctgcttttctcctttcgctttcgcttttcgtgtcgccgccgggcgaaaaagtgtttccctgagaagagaattttgcaaatatggttccaccaaggggtttgagnacatacgaatggttctttcggcgtggaagtgggtggttctcgcaancatcactncgcttgttcaggagagacgcgttccagttgaaaaagcaggaagtgagatttgtgntgaacacgagctgnccctgtggtgccacgccagagaaga

SEQ ID NO: 5070 - DNA, 178 bp, Glycine max
  Clone ID: 700560346H1
ttaaccccaaaagcgccatgcaagatagggttaaagactacaatggggagaagaatcgtaatcttacctgagcagtttaaaattttgggagacgataacttttgtctttataccatgtgtttcctcgctatttgatggtgtacgatttgcttataaataagaaatgaacgcaacaatc

SEQ ID NO: 5071 - DNA, 293 bp, Glycine max
  unsure (1)..(293): unsure at all n locations; Clone ID: 700560347H1
gcttacgtgatagcatttacagccctagccagtggaacctcatggnctgatctagtggcaagcaaaattgctgcagaacgtcaaaaaactgntgattctgcaattgcaaacatcacttgcagcaattcagtgaatatatatgttggtattggtgttccatggcttattgatactttgtacaacttcatagcatatagagaacctctccgaatccaaaatgcagggggactaagctttcgttgattgttttctctccacttctgtcgggtgtatctcagttttggttttaaggc

SEQ ID NO: 5072 - DNA, 298 bp, Glycine max
  Clone ID: 700560348H1
caggcgcacgttagcacaaactatcatggccacggcaacagcagctgccacctcgtcctttatggggacgcgtctcctggaggctcactccggagcggggcgagtgcacgcccgattcggcttcggcaagaaaaaggctcccgccccaaagaaagcctccaggggatcgggccgagacaccgacagacccctttggtatccgggcgccaaagcgcccgaatacctcgatgggagtcttgtcggagatacgggttcgatccgtttgggctagggaagcccgcggagtacctgcattcga

SEQ ID NO: 5073 - DNA, 279 bp, Glycine max
  unsure (1)..(279): unsure at all n locations; Clone ID: 700560349H1
gttatccacaacactctcaaccctccttaaaccctaaccaatccaaccatggcttcttcttccancttcactgcaatgtcccgcctgcaagctctcctcctccgccgccatctcctccttcccctcncgccgcngctccaacgccgtcgttctgtcgaggcgcaggngcngccagggtctccgccatggcnaaggagttgcattcaacaaagacggcancgcaattaagaagctncagagcggtgtgaaaagctcgcggattcgttgnggtcacgcntg

SEQ ID NO: 5074 - DNA, 277 bp, Glycine max
  unsure (1)..(277): unsure at all n locations; Clone ID: 700560350H1
tgaaggcacggagtgggtatgagttgacatgaccaaaattatttgcctttggtttgctatgatgatgattattcattttgaggggtgggtggtgaaggcttcttgtagttgacacatgaaaggaaacacaaaccagggaaaggaaatttcagtggccgggatcgatcataaggaggaagaaatacnnggttttgggacctcttcncttnnccttataaaaagtccaaaacaggagcctcttggtgttttagaaaggaggaggttggggganaagggt

SEQ ID NO: 5075 - DNA, 160 bp, Glycine max
  unsure (1)..(160): unsure at all n locations; Clone ID: 700560351H1
gncaaaanaaaagacacttcactccaattccnnacctgttgctganngncccaaaanacttacaacattctatgtttctgttcagaggaagaaggaaaaaccaaaaaagttagtcgtggttttgntgatttgnancngntncanttcaantnattccana

SEQ ID NO: 5076 - DNA, 281 bp, Glycine max
  unsure (1)..(281): unsure at all n locations; Clone ID: 700560355H1
ancctccactctcgagtccaaactcccctcctacccaaaatggatgcaagggcatcatcttcttcagcttcntcgattcttttccttgcagcaattgtagctgcttatttctattcatcagaagcagctgtgtccaaaggatcttttgaggacaatttcagcataatgtggtctgaggaccattttactacctctaaagatggacagatctggtatctctcactagacaaagacacaggatgtggattcaaacaaaacaacgctacagatttgggtggttc

SEQ ID NO: 5077 - DNA, 284 bp, Glycine max
  unsure (1)..(284): unsure at all n locations; Clone ID: 700560357H1
tcgctcgctcctcgtggacactatttaaattaaaaacctcttcctttcactctctccatcctcttcatctttcttcttctcgtntttactttgacggtttctagagagagaaagtttgttatagagagagaaagcgcnnnnnnnnnnnnnnnnnnnnnnnnnngacagtgagaagagagagagaagcgctcttctccgtaccgtttctagagagaganactgatggccggagttaatccgaacggcgtcgcngattttccggcgactccaacgcaggcggacag

SEQ ID NO: 5078 - DNA, 287 bp, Glycine max
  unsure (1)..(287): unsure at all n locations; Clone ID: 700560359H1
tgctgaatgcatggcctctgtggtccttctggagggctttctngacatggtaaaaaaaggantgtntttaacaaccccccatggaccccctcaatgtgtcttaaaggaagtcccctctgatctaccaggttactcaaacagtattttgaactctcaatacctgaaggcggcacaagatttgcttgatgaaatagttagtgtccgaaaggctttgaagcaatctgggaatgggnaaaacaagagaacactggattagatggctctaaagattctgatggaanatctac

SEQ ID NO: 5079 - DNA, 287 bp, Glycine max
  unsure (1)..(287): unsure at all n locations; Clone ID: 700560361H1
gaatgctggagtcttatgtcattgccagagatagattttctggtttccngctggaaaaatgtttccagctgtggggaagggattcacatgggcactttcactgatgaatatttgtttattgaaattgctaataaggccctgttctggcagcagcaaaactattatggtgttgatttaacacccctacatgggactgcatttcaaggatactttctcagcctgtggtggatgctttgatccaagatgttaatagctccttcaatgttccagtgatagactcaccaaaa

SEQ ID NO: 5080 - DNA, 291 bp, Glycine max
  Clone ID: 700560362H1
gattgatacacccttcttcgttcctcactcaccagccacagattctctcttctctattcagtaaacggctgttttgtatacgagctgtcccggtctcagcctctacatcccaaaacatcaaaacaactggttgggctccttgtatggcttcttcctcagttggtagaagagctacatattcaacacaatctgtatcgacaaatgagccagttgtatctgtagattggcttatgataacctgaaggagccagatatcaaggtactagatgcttcgtggtacatgccggatga

SEQ ID NO: 5081 - DNA, 291 bp, Glycine max
  unsure (1)..(291): unsure at all n locations; Clone ID: 700560363H1
gnacaatgggcctctgcatcagcatctctgctcaagtcttcacttgntcttgacaagtctgagtgggtgaagggacaaaccttcggccaacttctgcatcagttgtgagatgcaaccccaccaccccatcaggcctcaccatcagagctggttcctatgctgatgagctcgttaagaccgcgaaaacagtggcttcaccagggaggggtattttggccatggatgagtccaatgctacctgtgggaagcgtttggctcaatgggctagagaacatgaagctaacgccagca

SEQ ID NO: 5082 - DNA, 281 bp, Glycine max
  unsure (1)..(281): unsure at all n locations; Clone ID: 700560365H1
gttctctctctcccaaactcaatccctgtgagtgctttctttctgtaactaacttgttccctgcgttaaccctaatcatcaactcaagcagtgaatgaatctgtggacggacgagaactcctcggtgatggnggccttcatgtcgtcctccgatctctcctcaatctggccctcgccggcgccgncgcaatccacggcggtcttcaatcaggacaccctccagcatcgcctgcaggccttgatcgaaggnncncganagactngaantatgccatcttctg

SEQ ID NO: 5083 - DNA, 268 bp, Glycine max
  unsure (1)..(268): unsure at all n locations; Clone ID: 700560366H1
ctgggtggcggagaagagtccacagttcgcagacgcaatttacagacaaaagctggaatgacatctgctgcagagagcatcacggaaagccttcgtcgtactcgtcaattgatggttcaggaggttgaaagaaacacaagcacacttatgactctgatgagtcaactggggtgttncaaaaggctgaaagtgaanntancgggcaccgctacgttgttgatgagaacacgaaatctcctctccacaatgcaacgtcaagatgtctaga

SEQ ID NO: 5084 - DNA, 273 bp, Glycine max
  unsure (1)..(273): unsure at all n locations; Clone ID: 700560369H1
cgttcacataccacgtagaaacagttcaatcattcttagccctaagcagacttcacatactcatccacttagtggcagtgttgtctctctgttactaccgcatcacccacttcttcctccaacctccaacagngccatggcttctcatgactgctgcggagttcttctctcgctgctctggttcttcaaccaagccttccggtggcgaccggtgtcgcggaggtcatgactgagaagctaccgagtgaggagaagctgcggggctgacatctt

SEQ ID NO: 5085 - DNA, 277 bp, Glycine max
  unsure (1)..(277): unsure at all n locations; Clone ID: 700560370H1
ctataacaataatattgagagttagagataattcnngnncaacantncctaatgnccatagaatanngnaaaattgtacaaatcctagctgatgtggcagctgcagcaagatttgtacaattttgccttattctatggtcattagcaatgttggcncaagaattatctataacaataatattgagagttagattttgcttggatttggtcttattttattgggggatggggagaagggttgtgtactagncncgcncataggtacaaaaccatcatc

SEQ ID NO: 5086 - DNA, 278 bp, Glycine max
  unsure (1)..(278): unsure at all n locations; Clone ID: 700560371H1
aagcaattgacgtgagcggccatncatggtttcgctttcatccacatacactaacactagcgtgccctttgtccgtttcctcttcatcctcccgttttctcagatgctccgtaaattctgccccgaagcgaagaagaagcagcttcattactgcttcgtggcaagagctcgcgggagttttactattctccgcgattccttcactgccgtgaaagctatagctaatagtccgctagggagtcgcttcagaggctanngaggagagaaagactttgctg

SEQ ID NO: 5087 - DNA, 283 bp, Glycine max
  unsure (1)..(283): unsure at all n locations; Clone ID: 700560373H1
gaagtgcgaagggaactgttgttganggcggggctagataaatcnaagggaccatttcgctttcatttattgtgcagaatggcacccctcnagacggggagatatagtagtttgtggagaagctttggaaaggtgcgggcttatttgatgatggtgcaaagcgggttgatgaagctacaccctctaataccgtacangntattggantgnataatgntccaattactggtngtngatttngagtnatngaatncctagataccncactgaaagggcaganacc

SEQ ID NO: 5088 - DNA, 279 bp, Glycine max
  unsure (1)..(279): unsure at all n locations; Clone ID: 700560375H1
caagnagagagnggcctttngatgaccggtgtccacgcacgccgttcatcangaagagagaggccttttgatgaccctgttagagacatggagggtatgcttgatgagtatggaagcaactcaagttttcanctacctggattttgcatgccccgaatgcttgangatgatggggggagtgattctgatgaaggggagtttgangctgtcacacctgaacatgatctgaaacatntgaatgcaaganacaatcatgcaattganaaaccnngcatgtgt

SEQ ID NO: 5089 - DNA, 283 bp, Glycine max
  unsure (1)..(283): unsure at all n locations; Clone ID: 700560376H1
gtcagaactcttatagatctggatgcaatggatggtaaacaaagtgtttctttattggcagagtgttctagttcccctgatgtcagcactagacgagctttagcaaatgcattggcagncgcaccatccatgtggactcttggaaatgcagggatgggggcattacagagactggcagaagatagcaacccagccattgctaccgcggcatccaaagctatttatgaactgaaaaaacaatgggaaatagaggaaggcgatactggaggttcatgatggatga

SEQ ID NO: 5090 - DNA, 287 bp, Glycine max
  unsure (1)..(287): unsure at all n locations; Clone ID: 700560377H1
cacactctctctttctctctcttcaaatcaaaacccatcacaattcacaacaacatacaaatncccaaatcctatcttttctcttctcatataaaagaacccttctttcgaatccttcccgctcttttccctctgatttaattcatgcgcagatccaaaccctaatccatctctccgagggtttgatggctgaccaaggattggaagggagccagccggtggatctacagaagcatccttctgggatcgtgcctacccttcaaaatattgtgtccacagtcaattgg

SEQ ID NO: 5091 - DNA, 286 bp, Glycine max
  Clone ID: 700560378H1
cctgctcttctgcgtcctggaagattagatagaaaaatagaaattccattgccaaatgaacaatcaaggatggaaattctcaagattcatgctgctgggattgctaagcacggtgaaatagattatgaagctgttgtgaagcttgcggagggctttaatggagctgatcttcgaaatgtgtgcacggaagctggaatggcagcaattcgtgcagaacgtgattatgtgatccatgaagatttatgaaggctgttagaaaactgatgatgcaaagaaactcgaatcc

SEQ ID NO: 5092 - DNA, 291 bp, Glycine max
  unsure (1)..(291): unsure at all n locations; Clone ID: 700560379H1
cttctctcttttcttcaaacttanaactacactttcanntctcccnctagttgcatacttcactcacaatccacacctgtacttaccntcntcaatcccatttcaagcaggcttggaaatgcataaggaaactgaggatgactatgcttacctctctaacttacttcaagactttaccattattcccaacattgacaaggcatggcttttagctcaccgggctcgcagttgcagggaatgtttgtcgtttcccaaccagatcttctaacaaacaagaggaggacatccatc

SEQ ID NO: 5093 - DNA, 294 bp, Glycine max
  unsure (1)..(294): unsure at all n locations; Clone ID: 700560380H1
ggagatgggcgnangaaaacgctgtcgttgcggcactcgcgggcgttggtnctactcgcggcgagtgtggcggtggatgctcaggagaactcggacgtgaagacgctggtgaagtacaagcacgggaagaagtactgcgacaaaggatgggaatgtaagggctggtcaatttactgttgtaacctcaccattaccgattatttccagacctaccagttcgagaatctgttctccaagcggaactcgccggtggcgcacgcggtcggatttgggataccatcctcatcgccgcgc

SEQ ID NO: 5094 - DNA, 273 bp, Glycine max
  unsure (1)..(273): unsure at all n locations; Clone ID: 700560382H1
gcactggatatcaacccttttaaacaaatatcgtaccgaggttttggaatttctgnatgacatatttgacaccctgctcaaggcactttcagatccatctgatgaggttgttcttctagttcttgatgttcatgcatgcattgcaaaagatcctcagcactttcggcaacttgttgtcttcctagtgcacaatttccgggtagacaattcccttttggagaagcgtggtgcttgataattcgtcgactttgtgtgcttttgaatgctgagaga

SEQ ID NO: 5095 - DNA, 274 bp, Glycine max
  unsure (1)..(274): unsure at all n locations; Clone ID: 700560383H1
tcaacacctcagagaacccaaattccgcgccaagangttagggtttcaccgcgaagaagaagagagagcagaagcagcaatggaagcatacggtggtttcatgattgacgagaaagccgttagggttgagaacgctttccttgatttcctcaaaagcttcaagtccagtagccatcggaacgaactttattacgaagcggagatcgaattgatgaagagcaatgactccaacaccatgttcgtcgatttcgaccacgtcatcagattcagcgac

SEQ ID NO: 5096 - DNA, 278 bp, Glycine max
  unsure (1)..(278): unsure at all n locations; Clone ID: 700560384H1
caaacacaccaattgcatttgcattaccattcacaatggcaatctcctccacttccaactccctncattcccaccaaatctctaatcccccaatcccaccccctcattcccaacaccaggcccgccctccggcccaagcccggcccatccccttccatcttcgccgttcacgccgccgagcccgccaaaaaccccgtcgtcaccgacaagcccaagccccaagcccaacaacctcccccggcctcggnccgggcaacgaaatgggccgtggacagctg

SEQ ID NO: 5097 - DNA, 276 bp, Glycine max
  Clone ID: 700560385H1
ctgggaggaagttcattgggcaggcaagtggctccagtgtctcaaactcctgttggggcaggtaattcatactcggggaggctcaccgatgcggtgcatgtggggatgaatcctccgagtttaggaggtagtaaggagcagggaactgcagcaggtggtggtggttatccgaacgcgtggttcaatgcggaaagaagtggcaagtgctgtcgagccagagcaaccagcttggtctagtgctggtgctgcttcccaagttggctcacgccatgcccc

SEQ ID NO: 5098 - DNA, 271 bp, Glycine max
  unsure (1)..(271): unsure at all n locations; Clone ID: 700560386H1
tttgaaattaacaagtagcaaagatgtttggnatcatcggaggaaacaagggtcacaagataaaggggaacttggtgattatgcgaaagaatntgttggatatcaacagcattaccagtgttaagggtgtcatcggaaccggcattaacatcattggaggngtcgtcgacaccgttactgctttngcgtcccacatctccatccagctcattagtgccaccanggctgatggactgggaanggaaagttnccaaggctacaatttaagagg

SEQ ID NO: 5099 - DNA, 273 bp, Glycine max
  unsure (1)..(273): unsure at all n locations; Clone ID: 700560388H1
gcgaganatggcgatggcaatggcgcttcgcaggctttcatcttcaattgacaagccttctgcgccctctcttcaatgccggttccctctactacaagtcgtctttgcctgatgaagctgtttacgacaaggagcgacccggagttacatggccgaagcagttgaatgctccacttgaggtcgtggatcctgagattgctgatatattgagctgagaaagctaggcaatggaagggctagaatgataccgtcagagatttcactcgtgtcgtg

SEQ ID NO: 5100 - DNA, 278 bp, Glycine max
  unsure (1)..(278): unsure at all n locations; Clone ID: 700560389H1
gtctcgaagatcgagatatctatttagatctcananaaacagtgtttcatttcaattcattcagtcttatnattattagggtttggcgattcagagaganagagaaatgggagaacgaaaaggaatcccaattgctctggggctcttggcgatgctcctcttcttcattgcttcttcctcttcctctcacctcgttcgtgcttccgatgacgccgacgacgcgatcttctacgagtcatcgacgaggattttgacggacggtggattgtgtccgacaa

SEQ ID NO: 5101 - DNA, 278 bp, Glycine max
  unsure (1)..(278): unsure at all n locations; Clone ID: 700560390H1
gccctaagtccccaactacgccattcattgcttgtgttgggagctgttctgtnttcttctccacttcaaatcagcgtctcagtttcaaagcaaacatcgacaacaacaaactaganagaaagaaaggnacacgaaacctcaaaaaagcagaacaccatgaagtttcggtacgcgatggtgtgttcttcgaaccagaaccgaagcatggaggctcntttcctgctcaagaggcagggttcgacgtgtcctcgtaggcacggtgcccacgttaagctccc

SEQ ID NO: 5102 - DNA, 281 bp, Glycine max
  unsure (1)..(281): unsure at all n locations; Clone ID: 700560391H1
tggaaattgttgaagttcagggatgatttctgtcaaagttgattccnaagagtcaatgataacagaaggnaccatattatggctggaggattcagattggcaaaagggttatcagtaaaagaggtaatcaacnctantggaatgactacttcttggatctctggtgaagacccngggacaaaatctggtcctaatacgtggggtctcatccgtcccagctgggaacngcattgggnagatatgcattatggtanccagttcagangcngaccaagtatgac

SEQ ID NO: 5103 - DNA, 271 bp, Glycine max
  unsure (1)..(271): unsure at all n locations; Clone ID: 700560392H1
gttttatgatgacttctgcctatattacttgcaaatgttatatgatacaatacaaagtataaatagtttgcttgaaaatttggaagttcttcaaccttgtatgatatttgtagtncgctgtatttgttgtcaataaagatgttgctgtcttattatgattcatggtggaaatacctatctgatgtttgatttttggggtatctttttgtttcatttcagtttagtgcaactgtttttggagttcaacagaatccagcagttatcgtatgac

SEQ ID NO: 5104 - DNA, 268 bp, Glycine max
  unsure (1)..(268): unsure at all n locations; Clone ID: 700560395H1
ctctttctctcagtctcatccacgtaaacaactcattggttttcaccaatagantacacatcatcctccatttcactgctctatgtttcttggtttactacaggctttgnntcttctttcagaatccacaaaccagacgaggnactactttgttcccttggcttcttgtttttgcctctgaaatcattctctccttcattggatctggtcaaggtttccgctggcacccatttcaagaatgtgtttcctgaaaggttaccacaggatg

SEQ ID NO: 5105 - DNA, 292 bp, Glycine max
  unsure (1)..(292): unsure at all n locations; Clone ID: 700560396H1
aaagctatagatttaattgatgaagcaggttctcgagtccggcttcaacatgcacagttacctgaagaagcaagagagctgacaaggaggctagacagattgtaaaggagaaagaagaatctgttcgcaatcaagactttgagaaggccggagagctaagagataaagaaatggatcttaaggcgcagatatctgcactatagaaaaaggcaaggagatgagtaaggcagaaagtgaggcaggagatgaaggtcccatggtcatgaattgacatacaacatattgtctccnc

SEQ ID NO: 5106 - DNA, 306 bp, Glycine max
  Clone ID: 700560401H1
tgactgatgagctgagaacggttttggagactaacttacctaaagttaaggaaggtaagaagtccaagttcagtttaggtgtatcggatccaaagattggttcccagatatctgaacttactaaaattccttgccaaagtaatgagtttgtcgccgagctgcttcgcggtgtgcgcctccattttgataggtttgtcagtgatctcaagtccggggatttggaaaaggcacaacttggtctggggcatagttacagcagagcaaaggtgaaattcaatgttaaccgtgttgacaacatggtcatca

SEQ ID NO: 5107 - DNA, 300 bp, Glycine max
  Clone ID: 700560402H1
cttaggagaagaagattgctttggagggaaaatggaaggttcgcggctcaaatatgttgaccatcatcttcggcaacagcgagcacttcaacaattgggaatgatccagcacaatgcttggagaccccagagaggattgcctgaaagatccgtttctgttcttcgtgcttggctcttcgaacacttcctccatccttatcctaaggattcggacaagcacatgctagcaaaacaaacagggctaactaggagccaggtttcaaattggtttataaatgctcgagttcggctttggaagcc

SEQ ID NO: 5108 - DNA, 130 bp, Glycine max
  unsure (1)..(130): unsure at all n locations; Clone ID: 700560403H1
ctcnnncgaagcccttntctctctctcttcaatttcacccttttagctttgtacattcctnctcttccttgaatcgntcttnnttgcnagaggggtatcgngaagtngttggcctcccttnnggcnngtc

SEQ ID NO: 5109 - DNA, 254 bp, Glycine max
  unsure (1)..(254): unsure at all n locations; Clone ID: 700560404H1
tcttccaattcttctggagctnnttctctgcttcactcactaggaagaaaccctggagggtggagaaacattaacagatttagcacggctgcagcagttgaggaactaatcactccacaagtttcaatacgttacacacagaacctgataaatgggcaatttgtggatgctgcatcagggaaaacatttccaacatatgatccgcgctcaggagaagtgattgctaatgttgctgaaggggatgttgaagatat

SEQ ID NO: 5110 - DNA, 295 bp, Glycine max
  Clone ID: 700560406H1
agatattgaagtttatctcaaatgctaagagtgagggtgcaaccattttgactggtgggtctcgcccagagcatctaaagaagggattctttgttgaaccaactgtcataactgatgtaactacctccatgcaaatttggagagaagaagtatttggaccagttctctgtgtaaaaacatttagcactgaggaagaagctattgatctagcaaatgacactgtataggctgggttctgctgtaatatcaaatgatctagaaagatgtgagcgcattactaaggctttaaggctgg

SEQ ID NO: 5111 - DNA, 298 bp, Glycine max
  Clone ID: 700560407H1
ggctgtacttacaagacgtaatagcatcactggagttgcttacaaagacgacccaactataatggcttgggaacttatgaatgagattaggtgcccttctgatcaatcaggaaggacagttcaggcttggatcactgagatggcatcttacctgaaatccatagatggaaaccacttgctggaagctggtctggagggtttctacggccagtcaaagcctcagtctaacccaaacttcaatgtaggaaccgatttcattgccaacaaccaaatcccaggcattgatttcgcaacagtg

SEQ ID NO: 5112 - DNA, 301 bp, Glycine max
  Clone ID: 700560409H1
ttcatactgatcacttccttgcctattgcacattcttcatcacttcattcaacatttctctctcccttagctagtttttaccaatgggctgctgcggttagtgctgcagtctcttttccatccaccaagtctacctctctcccaagcaggacctccatcattaccccagagagagttgtattcaagaaggcttcattgcaatacagagatgtttgtagcagtggaagggtagtttccatcagagctcaagtcaccactgaggctccagccaaggttgaaaaagagtccaagaaacaggatg

SEQ ID NO: 5113 - DNA, 299 bp, Glycine max
  Clone ID: 700560410H1
gatgactcaggtttattcaaaggtaagtggagaagcacctctggaaaaacctactattgatgtgagctccaaagaattttatggtgagggatatgatgatagtgacaagagaattcctgacatgaccataattaataggcagcttggctggaatcctaaaacctcactttgggacctgcttgaatcaactctcacctatcagcacaggacttatgctgaagccgttaagaaagtcattgcaaagcccgtggcaagttaaacttgtatggtattgaattgcattgagaagagtgtttctg

SEQ ID NO: 5114 - DNA, 301 bp, Glycine max
  unsure (1)..(301): unsure at all n locations; Clone ID: 700560411H1
ttccttttctcttctctgtctaaggggtgccctgagatcacatttaacaatggtgaaggctgtggccgttcttgggcagcagtnagggtgtcactggaatttttcacttcgttcaggagggaagtggtccaaccaccgtaactggatctcttgctggtcttaagcctggtctccatggtttccatgtccatgccttgggggacactaccaatggttgcctctcaactggatcacatttcaatcctaataacaaggagcatggtgcccctgaggatgagaatcgncatgctggtgatcttgg

SEQ ID NO: 5115 - DNA, 302 bp, Glycine max
  unsure (1)..(302): unsure at all n locations; Clone ID: 700560413H1
ctctagtgtggtctgcaactatgagcaaggattatctaatcatactttctctccttctttccacggtgcttgcaactgcaagnnnnnnnnnnnnnnnnnnnnncctctatcttgggaagggcttctcccatcgcaaattgtctcccagttatcacattcacaaaaccattgacgaatcctatgcagttatcttcgatgctggtagcacgggaagccgtgtacatgtctatcgttttaaccaacaattagatctccttcgcattggccaagaccttgagttgtttgtcaagactatgccagtt

SEQ ID NO: 5116 - DNA, 301 bp, Glycine max
  Clone ID: 700560416H1
gcttatgctgcttttaaaatcttctttgtctttaatgctatcgcactttttacatctttggctgttgtggttgttcaaatcactttggttagaggtgaaactaaagcagagaaaagggtggtagtggtgatcaacaagctcatgtggttggctctgtctgtactcagtgacgtttattgctgcttcttacatagttgtgggtaagaagaatgagtgggctgcaattttggttacattagttggaggggtgataatatctggagttattggcactatgacttactatgtagtgaggtctaag

SEQ ID NO: 5117 - DNA, 292 bp, Glycine max
  unsure (1)..(292): unsure at all n locations; Clone ID: 700560418H1
tgaagctccatcaccactagcgaacacttccattgtttttatctcacaggatcgattcgatatcaccagcatcaccatggcagangtggcgccgccgaagaaggaaaacccgaaccttctcctggggcggttgcgagctcgggaagctcctcgggcacggaaccttcgcgaaggtccancacgcgcgcaanatcanaaccggagaaggagtcgccatcaagntcntgcaacaaggngaaaatcctaaaggggggtttngtctcccacataaagcgcgagatctccttctncg

SEQ ID NO: 5118 - DNA, 293 bp, Glycine max
  unsure (1)..(293): unsure at all n locations; Clone ID: 700560419H1
aggactttgacttcagtacaagatgttgtctttgtgttctccaactacaatctaatgaacccaaccacctacggcacacggaaagaatttcgttgtagtgttcattacacccaacaaccaagtgcagcaatcaccaaaaaagaagaaggcaaatcaaagttttgaaccttggttcaatatctagagtccctgcaagctcaacacatcagagataatcaaaatgcatcctgcgcagatcgttttgtatggatcaactttatgtgtcngataacagtgcattctccagaagctat

SEQ ID NO: 5119 - DNA, 261 bp, Glycine max
  unsure (1)..(261): unsure at all n locations; Clone ID: 700560420H1
atagtttctctgtgttttgttccgctaaatctccnnagcaatcaagcagagttctttaattanatgcaacctcagcacganggttaacagattccgaccgtctcaatgaatgtgtgattgtggtatgtgactcttcttttggtggactagagtcaaaatggcggtntgggnagtgagtgagtgaagcaactactttgcagctgaagttgtgtgctatcttttttttcttttcaactacatatgaggcttccttccatgggt

SEQ ID NO: 5120 - DNA, 297 bp, Glycine max
  Clone ID: 700560421H1
caacaaatgaatattctcggacaatcattcaacgaatcaaacaacggaagctactcttgttcgttcgccggagactggtagctcctctaacattccaaacacttttcactccgacgaggaagtgcacacactagcttcggcgcgtcctaagaaacgtgcggggcgtcgaatttttaaggagacaagacacccggtgtaccgaggagtacgaaggaggaacaacaacaagtgggtctgcgaggttcgtgttcccaacgacaagtccaccaggatttggcttggaacgtatccagtgcc

SEQ ID NO: 5121 - DNA, 294 bp, Glycine max
  unsure (1)..(294): unsure at all n locations; Clone ID: 700560424H1
cgaataccttctaaggnaaggatggattccttgcttggaattcgagttggagcacggtttcgtgtaccgtgagcacaacaggtcacctggatactatgatggacgctactggaccatgtggaagctgcctatgtttggctgcactgatgcttctcaggtgttgaaggagcttcaagaggctaagactgcanaccccaatggcttcatccgtatcattggatttgacaacgttcgccaagtgcagtgcatcagcttcatcgcctacaagcccccaggcttctaagtcatgaaaaa

SEQ ID NO: 5122 - DNA, 298 bp, Glycine max
  unsure (1)..(298): unsure at all n locations; Clone ID: 700560425H1
cnngctcgagggacaaacactttcgccaaccttctgctgcatcagttgtgagatgcaaccccaccaccccatcagggcctcaccatcagagctggttctatgctgatgagctcgttaagaccgcgaaaacagtggcttcaccagggaggggtattttggccatggatgagtccaatgctacctgtgggaagcgtttggcttcaattgggctagagaacactgaagctaaccgccaggcataccgtaccctccttgtgacagttccaggattggtcagtacatctctggtgccatctct

SEQ ID NO: 5123 - DNA, 297 bp, Glycine max
  unsure (1)..(297): unsure at all n locations; Clone ID: 700560427H1
ctgtggagtataaggatctagtctcattggaagagagcagattatcagatgtgatgtccaagttgggtctacaganaggttcagttctggcgacacatgaacgtcatgattcagcccaattttagagaagggatagttgacnactctattttacacagngtnttaatggaatatnttagcatgctgataagtcatctgtcacagatatnatccaacagttatcangtccactcatgttagaatgattggtacaanggnaggagccaaattggaattcnntgtgtaaaatatggggaa

SEQ ID NO: 5124 - DNA, 300 bp, Glycine max
  unsure (1)..(300): unsure at all n locations; Clone ID: 700560431H1
tatttttctcactgtcttgtctctccagagaactgtatagagagagatggcagctgcaacatctggtgctgtgttaaatgggttgggatcttccttcttgagtggaggaaacaggagccaaacccttctggccactgctattggaggcaaannnnnnnnnnnnnnnnnnnnnnnnagtcctagaagactcattgtggtagctgctgctgcaccaaagaagtcatggctccctggtgtcagaggtggtggcaacctcgtcgacccagaatggcttgatggatcgctaccaggtgactatgg

SEQ ID NO: 5125 - DNA, 294 bp, Glycine max
  unsure (1)..(294): unsure at all n locations; Clone ID: 700560434H1
tgcgaattgaacctcaaaatcagtctctaatatttttctcactgtcttgtctctccagagaactgtatagagagagatgggcagctgcaatntctggtgctgtgttaaatgggttgggatcttcctcttgagtggaggaaacaggagccaaacccttctggccactgctattggaggcnaannnnnnnnnnnnnnnnnnnnnnnnagtcctagaagactcattgtggtagctgctgctgcaccaaagaagtcatggctccctggtgtcagaggtggtggcaacctcgtcgaccc

SEQ ID NO: 5126 - DNA, 294 bp, Glycine max
  Clone ID: 700560437H1
gggagcaacatggatttgcgaggaacaaaatctggtttattgagaaagatcctccatcgcttgctggagatttcaatggaaaagtttatattgacttgcttctcaaaccatcagaagacgatatgaaaatatggccacatagattcgagtttcgcctaagggtctctttggccgcagatggaaatttgactttgacatctcgcatcaggaatgtcaatggcaagaatttagtttctccattgcatatcatacatatttttccgtctcagatatcagtgaagtgagggtagaagg

SEQ ID NO: 5127 - DNA, 295 bp, Glycine max
  Clone ID: 700560438H1
agctgatctgaaaggaatggcgtccatttcgcggttctgttgtgtgcatatgcgagcgtctctatgcaacttcacagcccagaaaggtccatcacctcccacaaccttggacttggagcatcataaaacaacaccatgtttgctttcttccatcgaagaaggacgtgcggttaataggagacaacttattcttcacacgccagtagcagtagctgcatttgcagtcccaaatgcattggcacttcaatgatgtgtctgaggatgttcgtgtctacactgacgatgagaacaattc

SEQ ID NO: 5128 - DNA, 295 bp, Glycine max
  unsure (1)..(295): unsure at all n locations; Clone ID: 700560439H1
ggcatcccatcatcagaagcctcagacaggatcaaagctggnttcattcacttcnagaaggngaaatatgacaagaatccagctttgtatggtgaacttgccaaaggccagagccccaagtttatggtgtttgcttgctcagactcaagggtgtgcccatctcatgtgctagatttccaaccaggagaggcctttgtggtcagaaatgttgctaacattgtcccaccatatgaccagtcaaaatacgctggaactggggnccgcagttgagtatgctgttttgcatcttaaggtg

SEQ ID NO: 5129 - DNA, 275 bp, Glycine max
  unsure (1)..(275): unsure at all n locations; Clone ID: 700560442H1
gggancaagtgtttctntngagacctacnaggagnnntactttagcttctagaatcatgcccagcanccantacttgtttcgtggattgtgatgnttctccttcctatgccagtgtatcntctannaggactccattttctccacagggttctcagtcatgctattcagatcaccagcagtcctctgacaacacctacggttcgccaataagcggcttgtccagtgttnatgacgggcagaactgnagcacaagcttagagaatggagattcatg

SEQ ID NO: 5130 - DNA, 298 bp, Glycine max
  unsure (1)..(298): unsure at all n locations; Clone ID: 700560443H1
attagatcttcgtatggtggaagctgagcgaattgggatttgatatgctgaagggcaactgcagttgacaaaattccctcagatttagnagggatggancgcatcaatgcaacatctgctagtcttgattgatgacatctacaaatatgttgacgatgttgtggaaggacgagtggcaccagacaacaaaatcgggagatttatatcagaagctgtaggttcccttcccaaattgtccccatcagtttttgataagcttgtgaatgacagtttgcaggatcacttgcttttgctgtat

SEQ ID NO: 5131 - DNA, 209 bp, Glycine max
  unsure (1)..(209): unsure at all n locations; Clone ID: 700560447H1
atctcaacnaaagccttgancatgaaagcaacccctttagtgtcttcctcctcttcaccatagccaaagggttcacaacccaaatgtgatgctaccacaacatgaccagaggtcacctcaaggtcagtgtagccagtccatagctaagctgctggagaatgctaactcagcagcagagtnatctttntgtgaggcagtcatctaggana

SEQ ID NO: 5132 - DNA, 291 bp, Glycine max
  Clone ID: 700560450H1
cccagcttttgttgctcaattcccaggtctcaatggccttgacctctctgcagcaagattagaccttggtcctggtggtgttatcccactccacactcaccctggtgccaatgaactactcattgttctccaaggtcacatccttgctggattcatatcttcaggtaacatagtttatcagaaggtgctaaaaaagggagagctcatggttttcccacaagggttgttgcacttccaaattgctgttggtaagagaaaggccctgcttttcctgtcttcagcagtgctttt

SEQ ID NO: 5133 - DNA, 292 bp, Glycine max
  unsure (1)..(292): unsure at all n locations; Clone ID: 700560452H1
tcccttcttttccaccatcaaaccctacacncatacttcccaacacaaacaccannccctactnnnnnnnnnnnnnnnnnncctccaagcaccatcaccccaccttccttccccaatttccccgccgatctcttgtcgaattcgagttcttcatcgacttcttcggaggaaacaccgacgacggaggccagagggcgcaagaggaagaggaagtggaaggacttctttgagaggctcatgaaggaggtgatagagaagcaggaggagctgcaaaggaggttcttggaggcca

SEQ ID NO: 5134 - DNA, 290 bp, Glycine max
  unsure (1)..(290): unsure at all n locations; Clone ID: 700560453H1
ggggaatgctacantaaattacttgaggtgtccaaggcatttgtagagggganaatgcttctagaagattatgttttaactttgaaggcctcagttgggctcaaagctcttgttgagggagtaggagttggtaaggggaaagaagatctacaggactcgctatagattctatgaaatccacacaagtacttcctncgtcgccaagaaatacctgttggcaaagcatgttcatgcttantncttctgaaataataagctttctaacaggtgatttcagattaagtaaagct

SEQ ID NO: 5135 - DNA, 292 bp, Glycine max
  Clone ID: 700560454H1
ctcttcctcaccgattgctagaatggaatttcgatgctcagtcatctcttttaccattctcttctctcttgctcttgcaggagagagccatgtccatgcatcgctacctgaggaagattattgggaagctgtttggccaaacactcccattcccactgcactgcgagagcttctaaagcctctccctgcaggtgttgaaatcgatgaactccctaagcaaattgatgatacacagtacccaaaaacattcttctataaagaagaccttcatccaggcaaaacaatgaaagta

SEQ ID NO: 5136 - DNA, 123 bp, Glycine max
  Clone ID: 700560455H1
gagacatcagctttctagagatcgagacttttactaaattcagtatgtcattttcttttcttagtactgttggcatttggtacatgactggatatagaaaaccttgttaaaattttaaaaaaa

SEQ ID NO: 5137 - DNA, 290 bp, Glycine max
  unsure (1)..(290): unsure at all n locations; Clone ID: 700560457H1
aggaatccaagtngccggttaggcgatgtttgttagtagatctttctaaggaacttggctttgaggangatactgngaaactctgttgtcatgataatctgtctgcaacggttgaagaggagcaacgggaagatggctccgaaggnagcaacaactattctcctgaagatagatgtctaagtcagacacaagtagtgaggaaaactcacctgttattncttgcccagctagtcctcctaatgaggccaatgatcacagagatgantcccagaaaagtagtgttgggtcta

SEQ ID NO: 5138 - DNA, 291 bp, Glycine max
  unsure (1)..(291): unsure at all n locations; Clone ID: 700560459H1
cataaatcctcaaggaggacatgtaaatatccagtcctttgatgatagttttacggcaaaaaatagtggattaggcactacnactaatcatgcagttcgtcggtctcatagttcggccatgcaaatgcctaaacagcagagcctgtttgttactggccctccaatcacactttctgttgtaagcagaattaggaacggagctaatggctggagaggcactgtaancggtgctgctgcagctgcaactggtaggaaaaatgcctttctggggccatgcttcatctttccgta

SEQ ID NO: 5139 - DNA, 290 bp, Glycine max
  unsure (1)..(290): unsure at all n locations; Clone ID: 700560462H1
ccgaacattgatatcatgcctcgttcatgggaatgncaaatttgcacgcaagcaatattatgatggctgcagttgactatcgtgtattttaatggaaaaatagtcgaatgtagtgtcaagagctccttgtgttagtttggatttaactctacccctacgttcgtcctganaattatcatattctgcgtgttattagttgttgtattcacggataaagttggaataccagatgagttataccagtggtgcccctcccctttttccaaaaaanncnanaaaaaaaaaanngg

SEQ ID NO: 5140 - DNA, 294 bp, Glycine max
  Clone ID: 700560465H1
caaaggattctacccgccgctcgatgggaattgcgcttcaaggcgtcttcgtagggctaatccgccttcacgagggtcaccaacggcacgtgcctttggggggccgaggccccctactgctggtcggcaaacggacggcgggcgcacgcgtcgcttctagcccggattctgacttagaggcgttcagttcataatccaacgcacggtagcttcgcgccactggcttttcaaccaagcgcgatgaccaattgtgcgaatcaacggttcctctcgtactaggttgaatatattgcg

SEQ ID NO: 5141 - DNA, 284 bp, Glycine max
  Clone ID: 700560467H1
gggatccccgtgcccttcgagaattcactcgtgattcagttcgtccacgtgcacagcgagaacgagaaggatttggccggtttggattggaaatcgatcgagaagagcttcaggtttgagggtaagagcaatggattgcttttaggggatcagagtttgagctttaggaagtatgagattaggtattcagagtgctcgatttgctcgttcgcgatctcgcggtcgataattcgtatacgtctaggtttctgtttgataatatacctgatgtgagtgagtattgg

SEQ ID NO: 5142 - DNA, 291 bp, Glycine max
  unsure (1)..(291): unsure at all n locations; Clone ID: 700560468H1
aaggcaagcgcttctcctctttgtgttnctgggctatgcttcttgggcaagagttagtnccggacgaggattgcgtgtacacggtgtacgttcggacgggttcgatcatcaagggaggcaccgattcagtaattggtctgaagctatacgacaagtccggctacggcatatacatcaccaacctcgaggcatggggcgggttaatggatccgggtcacaactactacgagcggggcaacctcgacatattcagtggtagaggccctgcttggaagcacccgtttgcgaggc

SEQ ID NO: 5143 - DNA, 288 bp, Glycine max
  unsure (1)..(288): unsure at all n locations; Clone ID: 700560469H1
ctttgctattanctctttttccaaactctaaaaatttttagttccacaaaaccaaaccaaaatggcagcagcctcgggcctcatccaccatgatatcaacaccagccttatctccaagcacaagcatccanaagcaccatcatttgaagccatccaacgtgtgctttcaaggncttagacccctcacaaggttcacaaccaaagtgagcagcaccaccaaaagggttattccaaagggtggtgtcngtgttagagctgaatcaatcagcacttgtcataagcctcagc

SEQ ID NO: 5144 - DNA, 290 bp, Glycine max
  unsure (1)..(290): unsure at all n locations; Clone ID: 700560472H1
ananaaggggagagtgctttganaatgggaaagtttagttcaagttcacagtacttctgattttgttcactttggagttctacttccctttcttctgntntcacagttgttctttcaacttgcatggtgtggctccatagtaaagttccttcctggattagagggaccccttccntntgttcttgncaccgggtatgtgggagtgggtgaatcagaggatgtgcaggcnttctactacttcattgagtcagagaacaatccaaaggaggatcctctcatgctttggctca

SEQ ID NO: 5145 - DNA, 286 bp, Glycine max
  unsure (1)..(286): unsure at all n locations; Clone ID: 700560483H1
gcgccagaccgacctcccattcctcctcgccgtcgaaganttttctccatcnccggccgtgggaccgtcgccaccggccgcgtagagcgtggcaccgtcaaagtaggggaaactgttgaccttgtaggattgagagagacaagaaacacaacggtcacaggtgtggaaatgttccagaagattctagacgaagccctncgccggggacaacgtggggctgttgctgagaggggttcaaaagacggacatccagagagggatggtgttggcgaactgggcacgatta

SEQ ID NO: 5146 - DNA, 282 bp, Glycine max
  unsure (1)..(282): unsure at all n locations; Clone ID: 700560484H1
ccattggctatggttgagcatgttngtttcagagctttcataaaaaatctacagccattgtttgaacttgtgtcgttgaataaggttgaggctgattgtattgagatttatgagagagagaggaaaaaggtgaatgagatgttggataaattgcctgggaaaatcagtctagtgctgatgtgtggaatgctgtggacgatgcagagtattatgtttgacatcaaattacattgatgantctggcagttaagaaggaggatattaaattttataaggatgatc

SEQ ID NO: 5147 - DNA, 282 bp, Glycine max
  unsure (1)..(282): unsure at all n locations; Clone ID: 700560488H1
ggngtacctcttgtttggggattcaacacagtctganattctggtcaattttgaccagaatgctggttctgcacttggttcattggctcaatgttttagtccgtttaagctatgcttttcatgttatgttgantttccctctcctgaatttctcctagagaaccaacgtagatgagtnctcttccccaagaagcctctantgccacagatagcaagagatttgtgancctcactctagtgctgctgtctaagctacntgctgctatgtagtcccagatattg

SEQ ID NO: 5148 - DNA, 334 bp, Glycine max
  Clone ID: 700560501H1
caaagaaaagccaccttaacatctcttctctgaaaattctctttagagagatagagagaggaagaaagaatggcagcttgcactgtctactcaacacaatctctgagcacaaattgctccatctcaaccccatcaaagacgcaactcagttttttccaccaaaagcaggtagttttctggaggaacagcaagaagggcagctgcagcagcagaagaagctatgtgataacatgtgcagcaggtgactcacagacagtggtgattggcctggctgcagactcagggtgtgggaagagcaccttcatgaggaggctgaccagtgtgtttggaggag

SEQ ID NO: 5149 - DNA, 327 bp, Glycine max
  Clone ID: 700560502H1
ccaacaacgatcatggaaccccccttaagtgtgatccccatgtaaatactggtttgcaacttctcaccgctaacgctggaagtgatcagtcaaccgtggatgatggggcttcatcggatgctgaagataagcttgtcaagatcactgagctggcacgattgcaagaggaccttcggcgcatgaatgcagagaaccaaaagctgaaggagatgctcagccatgtcagcagtaactacgcgaacttgcaaatgcatcttgcagcagtactgcaacagcaacataaccaacgcactgagaacacggaacaagggttgttcaaggaaaagc

SEQ ID NO: 5150 - DNA, 325 bp, Glycine max
  Clone ID: 700560503H1
atcctgcaagaaacaaaaggaagacatcaagactaaaatttcaagagtttatatgaggacagaagcatctgataaaagcctattgtgaaagatggatatcaatggaggaaatatggacaaaaggtgaccagggataacccttctccaagagcatatttcaagtgctcttttgctccaagctgcccggtcaaaaagaaggtgcaaagaagtgtggatgatcaatctgttctggttgcaacttatgaaggagagcacaatcatcctcacccttctcaaatggaggtaacaacaggctccaaccgttgtagactcttggttcagtacc

SEQ ID NO: 5151 - DNA, 320 bp, Glycine max
  Clone ID: 700560505H1
aaaaatcacggggagggatcgaagcccaagaaaatgggtctgccattagtacatgctctgttcttaactctgtttctgctctgcctccaaacaaaagcagaggattttggtgcaacagggaagctcgcaggaacatgcaacttgttcagtggaaaatgggtctatgatgcttcataccctctctatgacccttcaacttgccccttcgtagatccacagttcaattgccaaaagcatggtcgctcagataaactgtaccaaaaatataggtggatgccattttcttgtcccttgccaagttcaaggatgaactttttgga

SEQ ID NO: 5152 - DNA, 320 bp, Glycine max
  unsure (1)..(320): unsure at all n locations; Clone ID: 700560506H1
anattaacgaaaaaggagaagaggtgatgtatgactatgaagacaaaatcaatagagctgtgtttcctggactgcaaagtggtcctcacttccactctattactggtttagctgttgcattgaagcaggctacaactccaaactatagagcataccaagagcaggttctccgtaattgctcaaaatttgcacaggcactgagtgagaagggctatgagcttgtttctggtggaatgagaatcatctacttttggtgaatctgaagagcaagggtatgatggctccagagttcagaaggtgttgaatcagttcacattgcc

SEQ ID NO: 5153 - DNA, 280 bp, Glycine max
  unsure (1)..(280): unsure at all n locations; Clone ID: 700560507H1
ccaatgcaaacaggatttgaaganagatattgtacattacgatcatatttcattcnttgttattatctaatataattgaagcgatcaaagtttcaaaagggtttaatgaatttcaagggtagcgtctggtgccaggattgaccattagcaacttgtattgtttcgtgtaagttttcttgtcggcgattatatgaacttggagatgtgacatactctggctcatccctttagagaataatgcagccctgcagagtgtaataataaactgttacttggatgc

SEQ ID NO: 5154 - DNA, 320 bp, Glycine max
  unsure (1)..(320): unsure at all n locations; Clone ID: 700560508H1
tgaaatgaataggattcacagcagatatagcaaagctcacactaacatcaatttatgataacaacctcaaaatcaagttatcagtgtgtcaccctgacttttcaaagacaattatttgttgcttcatatttcactgtgatttcataatagattttcactcatcttacttgactccaagcattctatatatctnntgcctccacgcatctctaccctcaaatcttcaccacacaacactacctcnattactcaactaaagcttcattcattcatcgtgtcgtgttgtgttctttgcaaccatgttcttagaacagcgtcct

SEQ ID NO: 5155 - DNA, 313 bp, Glycine max
  unsure (1)..(313): unsure at all n locations; Clone ID: 700560511H1
atgcacccaaaaggaagagtggtacagtgacactgtgactgctgttcntgttcctgcttacattgatagtactgaaatagttaggagggcatggaagagatacaatttgagcttaggtctggactgaacaaagttgctgggaaggttttcagaattggacatcttggccacttgaatgagttgcaactgttgggatgtctagctggtgtagagatgatactcaaagatgtgggttatcctgtaaagcttggaagtggagttgctgctgccagtgcatacttacagaacactattccatgatcccttccaggat

SEQ ID NO: 5156 - DNA, 315 bp, Glycine max
  unsure (1)..(315): unsure at all n locations; Clone ID: 700560512H1
gaaggcacaaaaaatggcactgctttctttaagtggccatggacatgagcnatttgagatgacgggtttgggatcctgagtataataggttgttcaatgagggcatggtgtgcactgctagggttgtgtccaaggctgtgatcactggctacaaagatgggttcaaccagattaagtcctggttgatgttggaggtggcattggagggtctctttcggagattgttagggcttatcctcatatcaatgccatcaactttgacttgcctcatgtggttgccactgctcctaagttcgagggatcacccatgttgga

SEQ ID NO: 5157 - DNA, 322 bp, Glycine max
  unsure (1)..(322): unsure at all n locations; Clone ID: 700560513H1
ggaaaaacaagtagttgagaactaagaagaagggaatggcttcctcaatgatctcctccccagctgtttaccaacgtcaaaccgtggncggtggccggcatggttgctccattcaccggcctcaaatccatgggctggcttccccacgaggaagaccaacaatgacattacctccattgctagcaacggtggaagagtacaatgcatgcaggtgtggccaccaattggcaagaagaagttcgagactctttcctacttgccagacctcgatgatgcccaattggcaaaggaagtcgaataccttcaaggaaaggatggattc

SEQ ID NO: 5158 - DNA, 319 bp, Glycine max
  unsure (1)..(319): unsure at all n locations; Clone ID: 700560514H1
gtgccancaaaagaagatggcctcacagggttgcnaagctgctttccagaggccgcgaaggtcccttctctcccgnttccaagagcctccccatggacgtgcggttggggctgctacggctgtttcattgagctgcaaagtgcctcttttctacggaaagaacggttctggaagtggtnnnnnnnnnnnnnnnnnnnnnnnnnggatttcaggagcacttgctcttcctgccgcagcttacatgttccaagatcaggaggtgcgcgcantgagctggagcgcactttcatgccataagctgaggagtgcagagaaggtg

SEQ ID NO: 5159 - DNA, 326 bp, Glycine max
  unsure (1)..(326): unsure at all n locations; Clone ID: 700560517H1
gaacgcgatgccgcaagggtcaaaaccctcacccacttagccgcagccacaaacaaaacccgacccgccaaccccgggtcgggtttcagcagctccgtggtatcgggtctctcccaaggcagcggcgagtactttacgcgcctgggcgtgggaactcctccgaagtacctctacatggtcctcgacaccggaancgacgtcgtttggctccaatgcaagccctgcaccaaatgctactcccaaaccgaccaaatcttcgacccatcaaaatccaaatccttcgccggaatcccctgctactcccctctcgccgccgcctcgatccc

SEQ ID NO: 5160 - DNA, 132 bp, Glycine max
  unsure (1)..(132): unsure at all n locations; Clone ID: 700560518H1
agggcttgggttatttcgaggaaactgagtaactacgcaacggtgggtccgaccccgagtgcggcncgtgtgggnaacgacggtgacaatggttccttgatgattcctcgtttcaacgctttccgcgtaaat

SEQ ID NO: 5161 - DNA, 319 bp, Glycine max
  Clone ID: 700560519H1
ggccaccacagcagctctatccggaaccatggtgagcacctccttcatgaggaagcaacctatgacgaccaagagcctaaagacattccccaacgctctttttggtctgaaaggtggacgaggtggtcgtgtaacttgcatggcctcgtacaaggtgaagctcataaccccagaaggagaagtggagtttgaatgcccagatgatgttttcattgttgacaaggctgaggaagaaggcattgaacttccctactcgtgcagggctggttcttgcgtttcatgtgttgggaaaattgtgaaagtgacgtggaccatcaga

SEQ ID NO: 5162 - DNA, 320 bp, Glycine max
  unsure (1)..(320): unsure at all n locations; Clone ID: 700560520H1
agagagagagggagacacaacacaagggaaggaaaaccaagtggaatcaatagccatgaagatcgttcggaaagacctcgtacccaatggacctggcagcgttaagatggttgcagtggattcggatgatctctggtttgcgtatnacctgatagctcccggagactctgtcatggccgtnactgtcaggaaggttctaaganaagctgctantggcggacgggaagcagaacgcgtcaagctcaaattggaaattaaagtccaagagcttgctgattatgacaaagaaggttctattntactgttcgcggnaagaacat

SEQ ID NO: 5163 - DNA, 318 bp, Glycine max
  Clone ID: 700560521H1
gacgacggtggtgacgctacccttctcatccacgaaggcgtcaaggccgaggagctctatgagaagaccggcgaactccccgaccccaactccaccgacaacgccgagtttcagatcgtgcttaccatcatcagagatgggttgaagaccgatcccaccaggtaccgcaagatgaaggagcgtctcgttggggtttctgaggaaaccaccactggagttaagaggctctatcagatgcaggcgaatgggactcttctcttccctgctattaatgtcaatgactctgtcaccaagagcgagttgacaattgtatgggtg

SEQ ID NO: 5164 - DNA, 320 bp, Glycine max
  unsure (1)..(320): unsure at all n locations; Clone ID: 700560522H1
tggacatggctttcacacancttatcccttcaccttcttcttcctccttaaaccctatcacactctccctaaaccctaaatccccaacctctccgccgcagcagcatttcaatctcgatattctccggcaccggcgccggaggcctaattccactcttcggtgctccgcctcctcgttctcggagaagcaccacacgaactcctcgaactccgacgacgtggtggagctccccctgttccctctccctctggtcctcttccctggcgccatcctccccttgcagatcttcgagttccgctacgcatcatgatgcacacgt

SEQ ID NO: 5165 - DNA, 315 bp, Glycine max
  unsure (1)..(315): unsure at all n locations; Clone ID: 700560523H1
aaatatcacaaacgcagtcttctttatgaactttcactcgcagcttcttattcttgtgatctaagttcctctactctcattccaagcgtgggtgtatancaaggatccggattccttgtggtcggaggaagcacgcatgcacgcagttagacgattagaactgtcataaagattcaacagttgatgaattattttagtaaattcaacttaaaaaacacatttaaaatactaactgtctgatcaaattagacagtccacattcacgattgtgtgaatgcgtgagtgcaggtggagtgaataaaatggaggagagac

SEQ ID NO: 5166 - DNA, 319 bp, Glycine max
  unsure (1)..(319): unsure at all n locations; Clone ID: 700560524H1
cacaaacattgtatcagagcaactccatgncaaaagaacatccctgactcaagctatgaagcagggnttgaattggccattcagtcctctggcatagcaaaccaggaaccagctattacatccgccaaggnatgtctgaagncaacaaggagaatgggtccttcaccaaccctgantgctgcaagcctggcantnagcttatccaaggtggtaccttatagagcgcaantagaatggtacaagacttggtgcgatgagcaagacgaccanatgggttattacgactcttcanaagcagggctcttccagntccngnagg

SEQ ID NO: 5167 - DNA, 314 bp, Glycine max
  unsure (1)..(314): unsure at all n locations; Clone ID: 700560526H1
angctcaaagctttttgacagtttgagcatttcagacaaacatgggggatgatggaaagaagattagtggagagggggggttagtgaaggttgagccaaaacccagcaatggtttcacctcaaaagtggttgatttgttggagaaattggtggtgaagttcttgtatgattcttcactgccccatcactacctcactggtaattttgctcccgtgagtgagacccctccaaccaaggaccttcctgtcaaagggtaccttccggattgcttgaatggggagtttgtcagagttgggctaatccgaagtttgctc

SEQ ID NO: 5168 - DNA, 312 bp, Glycine max
  unsure (1)..(312): unsure at all n locations; Clone ID: 700560527H1
tgagggtggggagangaaaagaggcgcacgtttatgctgcgtgtgcaaganatcaagagcttcggtgaagaggccgaaaaccctagagcagatatgcagggagtgcttctacgatgcttttgagtctgagatccatcaggtaattcttgagaatcagctcttcagccctggtgaangcgtcgcaatcggcgcttctggcggaaaggattccaccgtccttgcctacgtcctctccaagctcaaccgcctccacaattacggcctccatctcttcctcctctccgtcgacgagggatcaccggctaccgcgac

SEQ ID NO: 5169 - DNA, 311 bp, Glycine max
  Clone ID: 700560528H1
tgatggtggaagtataccatttgctgcatctatccggtctaaatctcaaaactctcccctactatctattgggcttgtcattgtgggtgcaatccttctgattggttattgttacagcaattcaggtggagctagcggtggtattaaggatgtaagtaaacttgaaggtggtgcatcatgctcatcagaagtcctacaagcattgcccgttttgaagaaatcatatggagacagtttgcacaaggttttgcatgttggccctgactcttgttctgtgttatctagtttgttagagaagaggatactgaggt

SEQ ID NO: 5170 - DNA, 314 bp, Glycine max
  unsure (1)..(314): unsure at all n locations; Clone ID: 700560529H1
gccttagccttccctacaactccaaacatnaagacatcatcatccatggctgcctccgtctccactgtcggagctgtcaacagagctcttttgaacctgaatggttctggagctggagcttcagctcccagttcagccttctttgggaccagcttgaagaaggttattgcctcaagggtccccaacagcaaggtttccggtggaagcttcaagattgttgctgtagaagagaagaaagagattgaagagacccagcagaccgacaaggacagatggaagggtcttgcctatgatatccagacgaccaacaagac

SEQ ID NO: 5171 - DNA, 316 bp, Glycine max
  Clone ID: 700560530H1
tctccccttccctgatggccttcttatcaatggacgtggttggaatggaaacaccttcactgttgatcaaggtaagacttatagattcaggatatcaaatgtggggctcacaacatcaatcaacttcagaatccaggggcacagtttgaaacttgtggaggtagaaggatctcataccctccaaaacacctattcttcccttgatgtccatctcggacagtcctattccgtgctggtcacagctgatcaacctgtcaaggattactatatggttgtctctacaagatttaccagacggtacttacaacaacttccg

SEQ ID NO: 5172 - DNA, 316 bp, Glycine max
  unsure (1)..(316): unsure at all n locations; Clone ID: 700560531H1
ttcggaaatcagcagtagtaagtaagaaagttttgtacctacaaacaataattcaacttggntcattagttcattacacagtcgaattctgttttcgctttgaagttcgaancttgttgtacccttattctaggttccgcaccccgcaaaggancccgaacctgccatgtgctcgtcgcattccccgaaccaccgttcganatgcagagctccagcacctgccaatgccatcatcttccnccttgtaacatcctctgttccctctccttcattaacgtcaatcccagatctagaagcagctntcgcnacggattgt

SEQ ID NO: 5173 - DNA, 320 bp, Glycine max
  unsure (1)..(320): unsure at all n locations; Clone ID: 700560532H1
aaagaacnctaganggataaccctntctccaaaggattggaattggcctcataatccacatagtgattatggtgattgcatctctaactgaaaggtatagacttagagtggccaaagaacatgggctattagaaaatggaggacaagttccttgagcatttcatcttgcttcctcaatatgttcttatgggagcagctgatgcgtttgtcgaggttgccaaaatcgagtttttctatgaccaagccccagaaagcatgaagagccttggcacttcctattcaatgactacttaggcatgggattcctaagcacttttctt

SEQ ID NO: 5174 - DNA, 291 bp, Glycine max
  unsure (1)..(291): unsure at all n locations; Clone ID: 700560533H1
gcacgtattgttctaatccacaaaaataatggccttaaattacaacattgccctcgccttctctacggttctcacgctgcttctccttcccttaccaacccttggggagctcgtgcaggagcagccactagtcctcaagtaccacaacggccaactcctgaaggggcgcatcaccgtcaatctcatctggtacggcaccttcaccccgatccaaggtccataatcgtggacttcataaactcactaagcagcgcgccaaangcgccgcttccacgactgctacgtggtgga

SEQ ID NO: 5175 - DNA, 316 bp, Glycine max
  unsure (1)..(316): unsure at all n locations; Clone ID: 700560534H1
gttcaatggaacggctggtgtgtggagnataaaggcccttnaggatgntggtggttggctggagaggaccacagtggaggatatggatatcgctgtacgtgcccatcttcatggctggaaatttattttcctcaatgatgttgagtgccaatgtgagctacctgaatcttatgaagctatagaaaacagcagcatagatggcactctgggccaatgcaattgttccgtctttgtttgcccgacataatacgctccaagataagcatatggaggaaattcaacatgatattctctcttctctaagaaaatgatatta

SEQ ID NO: 5176 - DNA, 312 bp, Glycine max
  unsure (1)..(312): unsure at all n locations; Clone ID: 700560535H1
atggcaggtgatacaagagaatagcagcagtgaaatagagcaagtgaaattganctttccttgtctatgtttcccgtgagaaaaagccttctcatccccaccatttcaaagctggggccctcaatgtcctttaccgtgtctctgctgtgataagcaatgcnccatatattctagtgctggattgtgacatgttctgcaatgccccagcttcagcacgccaagcattgtgtnnccaccttgatcccnaganatcantttcacttgcgnntgtncaatttcctcaganatatcacatatnagcnagnatgacat

SEQ ID NO: 5177 - DNA, 316 bp, Glycine max
  Clone ID: 700560536H1
agataactagaaacagtgtgatgaaaatgaaggtccttgttttcttcgttgctacaattttggtagcatggcaatgccatgcgtacgatatgttccctctccgaatgaacactggctatggtgcccgtactccggaggtgaaatgcgcaagttggaggcttgctgtggaagcacacaacatctttggctttgagaccattcctgaagagtgcgttgaagcaacaaaggaatacatccatggcgaacaatatagatcagactccaaaacagttaaccaacaagcttacttttatgccaggacctcgaagtccatccc

SEQ ID NO: 5178 - DNA, 305 bp, Glycine max
  unsure (1)..(305): unsure at all n locations; Clone ID: 700560537H1
ctcccggtcctggacgcacaaaaaagatttttgttggtggtttaccatcaacnntcactgaaagtgattttaagacgtattttgatcagtttggtacaattactgatgttgtagttatgtatgatcataatacacagaggccaagaggtnttggcttcatcacttatgattctgaagaagctgtggatagagttcttacaaaacttttcatgaactcaatggaaagatggttgaggtgaagagggcagttcccaaagaactttcccctggtcccagccgaagcccattgtaggatatactaggtt

SEQ ID NO: 5179 - DNA, 315 bp, Glycine max
  Clone ID: 700560538H1
ccaggcgcacgttagcacaaactatcatggccacggcaacagcagctgccacctcgtcctttatggggacgcgtcttcctggaggctcactccggagcggggcgagtgcacgcccgattcggcttcggcaagaaaaaggctcccgccccaaagaaagcctccaggggatcgggccgagacaccgacagacccctttggtatccgggcgccaaagcgcccgaatacctcgatgggagtcttgtcggagatacgggttcgatccgtttgggctagggaagcccgcggagtacctgcagttcgagtggatcgctggac

SEQ ID NO: 5180 - DNA, 307 bp, Glycine max
  unsure (1)..(307): unsure at all n locations; Clone ID: 700560539H1
ttttggtancatggcaatgccatgcgtacgatatgttccctctccgaatgaanactggctatggtgcccgtactccggaggtgaaatgcgcaagttggaggcttgctgtggaagcacacaacatctttggctttgagaccattcctgaagagtgcgttgaagcnacaaaggaatacatccatggcgaacaatatagatcagactccaaaacagttaaccancaagcttacttttatgccagagacctcgaagtccatcccnaggacacatttgtgttcagtatagatgnaccgtactctctaatatt

SEQ ID NO: 5181 - DNA, 293 bp, Glycine max
  unsure (1)..(293): unsure at all n locations; Clone ID: 700560540H1
aatagcacaaagcaaagcttcatccnngagttaaaaaatggcagcagcttcttncatggctctctcatccccatccttggctggcnangncgtgaagctgggcccatcagcnccagaagtgggaagggtgagcatgaggnagaccgtcancaagcaggtctcctcagganngngcatggtacggnccagaccgngtcaagtacttggggccattctctggcgagcncncgtcctantaaccggtgagttcccaggcgactacggctgggacatgtggtttccgcagacccaga

SEQ ID NO: 5182 - DNA, 301 bp, Glycine max
  unsure (1)..(301): unsure at all n locations; Clone ID: 700560541H1
ttcttttagaactccctctgaccagatcagtgttgcanattcatcngcctctggganagcatatgtgaggatgcagaaattgtggacaaaaaacnaaacttaatgaactttgtccctactcttcggtctggagagtggtctgatatggagatcgcacttccatggangatacacatatatgcatcggagacttggcagaaaaatttggcataacgaactttacaaggaagctatttcctttatggtgtattgacggacatgganggaagagcgctgcacaatcgtcgtgatcatctgccac

SEQ ID NO: 5183 - DNA, 199 bp, Glycine max
  unsure (1)..(199): unsure at all n locations; Clone ID: 700560542H1
tggaccaattgaggttataggttgctcagatatgttttcaggaaccaaacagctggttgaggatattatgaaggcaataaaagttggcattgaaccaatccccattcagagtggnttaggaggtgcatatnattntaggaacagcaanggtganaatgctgctattgtgnnaccanactgatgacgagccttatgcacc

SEQ ID NO: 5184 - DNA, 311 bp, Glycine max
  Clone ID: 700560543H1
aaataaccaaaacagcagagagaagagaaggtgtagacaaacacaatctctaatggcactcaggatgtgggcttcttccactgccaatgcactcaaagtctcttctacctccagacctcatctcttgcatcctttttctttctccagatgcttgtcttccgtcttggatggacttaagtatgcagattcacacgaatgggtcaagcacgaaggctcagtcgccaccattggtatcactgaccatgcccaggaccatcttggagaggttgtgtatgtggagtgccagaatcaggggcacagttacccagaag

SEQ ID NO: 5185 - DNA, 308 bp, Glycine max
  unsure (1)..(308): unsure at all n locations; Clone ID: 700560544H1
tttgcntggactaagttttggtctgtgatccatagctttggtgagagcancggatatggaacgaacggtacgagactttgaaggagcttggttcanggaacttcggagtggcaaggttggccaaagacaaggagacaggagaacttgttgccatcaaatacatagaaaggggaaaaaagattgatgcgaatgttcaaagggagatagttaaccaccgatctttaaggcatccaaatattatcaggttcaaagaggtgnngagtttgtntctatactaaactgttcntgagttgatttttctagatatg

SEQ ID NO: 5186 - DNA, 316 bp, Glycine max
  Clone ID: 700560547H1
gcagcccaagatgactctggagaagctcttgctgtatggtaacatgcttgtccaagaacaagagaatgtcaagagagtccaattggctgacaagtacttgaacgaggctgctcttggaaatgctaacgaggatgctattcagaggggaactttcttccagtcttgaattggaggcaaagcaaacttggcaagtaaatatttctgttcgtgaaggttgttgtactaatccaagtgctagaagttgtgatggaactgcgtgtaacattcttagcatctcaatgtcttaggtgcaaagagagatgctaagttgagatga

SEQ ID NO: 5187 - DNA, 315 bp, Glycine max
  unsure (1)..(315): unsure at all n locations; Clone ID: 700560548H1
aatccnncacagttgcagnacagcacnnacacaagacagtgccaaggaaaaatactcagattcagcgttagtgtgtgattgtgaggctgttgagtgttgagtagggaaganaagtgaagacctcaaaacaacgagctaaatcaggctcttgaggacaaccaagagaagaagangagtgaagaagatgactgnaatgacgaagaatcaaccgtcacanaggtggtggcttgatagccacaccacttctaatcgatccccttggctcaatccactctctctgagttaatgagaagacaaggcatgttaaagttattg

SEQ ID NO: 5188 - DNA, 315 bp, Glycine max
  unsure (1)..(315): unsure at all n locations; Clone ID: 700560551H1
atggcaacgggactttagttccatccccataattgatattagtccccttttggctaaggcagatgatccaaaaatggctgaggatcctggtgtgcttgaggttgttaaacaattggataaggcttgtacagaggcagggttcttctacgtgaaaggacatggttttcctgagactctccttaaagaagttagagatgtaacgcgcagattctttgaactttcatatgaagaaaaggcgaagatcaaaatgactccagctgctgggttcagangttatcaaangctngaganaatatactanaggtgtacctgaca

SEQ ID NO: 5189 - DNA, 309 bp, Glycine max
  unsure (1)..(309): unsure at all n locations; Clone ID: 700560552H1
agacggaggagaactcgactgaagctgcctctgcgacgccgtttcgattcagcctcagacatttccgttgcagtcatggtgcaagaaaatggcaagaggaagaaaccaaacattctggtgactggcacaccggggacaggaaagacaactgtgtgcactgctctagctgaagccacccagctctgccacatcaatgtcggagaattagtcaaagaaaagaacttgcatgatggatgggatgatgagctgattgttaccttcttaatgaagacttggttgtgatgacttgaggngttatggaagaggggg

SEQ ID NO: 5190 - DNA, 311 bp, Glycine max
  unsure (1)..(311): unsure at all n locations; Clone ID: 700560553H1
gcttttccctttgatatggagtgttcctgaagctttgatcactgctgagatgggtaccatgttccctgaaaacagtggttatgtggtttgggtttcatctgctttgggtcccttttgggggtttcagcaaggttggatgaaatggcttagtggggtgatagacaacgcattataccccgttttatntcttgactatctgaagtcaggaatcccggctttaggtggtgggtttcctagagttgttgcaacatggggtctgactatagttctcacttacttgaactataggggtataccattgtgggatgggt

SEQ ID NO: 5191 - DNA, 311 bp, Glycine max
  unsure (1)..(311): unsure at all n locations; Clone ID: 700560555H1
ttttccttctctctggctttcctttgacgcttctgacactgctccttttctttctctccgtgtcctaatggctctccccgactcttcttcctgccgcaactccctgatcccctccttcatctactcctcttcctccaaaacgctccctctacaccacatgntcaantnnnnnnnnnnnnnnnnnnnnnnncagccgccggaaaacctccacgccggatcgcgcggcctcatgattccctctcccagcgagtcacgcaagatcgagatgtactcccctgccttctacgccgcctgaccgtggtggaatcctc

SEQ ID NO: 5192 - DNA, 309 bp, Glycine max
  unsure (1)..(309): unsure at all n locations; Clone ID: 700560560H1
aaaccactaagcnanggaagaaagnaactacngnaaagaaatgggttccactttctgcagtttcaatggctatgcccagtaacttatgctagccagaagagggtggtgcctagctcggatgcattcttcaagccactgcctctacggtcttccaaggcagtgacagcatcaaaactcaatggaaggttcaagtgagggcctccatgaaggagaaagttgtgacggggctcaccgcagctgcattgacagcttcaatgatggttcctgatgtggctgagntgccgttacacctctctcaagaacttcttg

SEQ ID NO: 5193 - DNA, 309 bp, Glycine max
  unsure (1)..(309): unsure at all n locations; Clone ID: 700560561H1
gngcnatgaatctgatgcaggcgggttcgctacgacgcctacgggggaggtcctgccggcctcaagcacgttgaagttgncgttcccagtccaaaggcaaatgaggttttaatcaaactggaagcagttagcattaaccctattgattggaagattcagaagggtcttctccgtcctttatttctccccagaaccttccccacataccttgcactgatgtggctggagaaatagttgagatcggaactcaagtcaaagatttcaaagttggcgaccaagtccttgctaaactatcatcaatatggaggt

SEQ ID NO: 5194 - DNA, 316 bp, Glycine max
  unsure (1)..(316): unsure at all n locations; Clone ID: 700560563H1
ttnancaantgtcnatgaatggcnaatagtagatcctggactcagatatggccaatgttttgtcaagctatgtgttctgaattttgtcttggttttcaaaatcacgggcattgggggatggcagtggaagtggtcctactgttanagcagaaaacacttgcaagaacacaatttatcaaagctttcctcccctccnacgtaccagaatatatctccanatgatatgcacactgtatggcacacctatgaattgaggtacttccagaatggtgataccacaactatcatattatctgtccctacacaatanggtggg

SEQ ID NO: 5195 - DNA, 310 bp, Glycine max
  unsure (1)..(310): unsure at all n locations; Clone ID: 700560566H1
ggncgagcacgcttccaatttccgtnacgtaaaccatgcntcaccgcctcccaaattagggtnccganangcgcgtggaggaatcgatggcgaccgtgaatccgcagcctctgcagttcgaggaccctgctatacccgtnnnnnnnnnnnnnnnnnnnnnnnnnnnnnnnnnnngtgatgatgacgctatggatgacttggaggatgcgaatgttaattcagtgaacgttgctgctaatgccgcggcgagtgtaaatcatgaagcggtagtggctatgcttccagaactagcggtcactctttctttcga

SEQ ID NO: 5196 - DNA, 309 bp, Glycine max
  unsure (1)..(309): unsure at all n locations; Clone ID: 700560568H1
atggcaacggactttagttccatccccataattgatattagtccccttttggctaaggcagatgatccaaaaatggctgaggatcctggtgtgcttgaggttgttaaacaattggataaggctgtacagaggcagggttcttctacgtgaaaggacatggttttcctgagactctccttaaagaagttagagatgtaacgcgcagattctttgaactttcatatgaagaaaangcgangatcaaaatgactccagctgctgggttcagangttatcaaaggcttngaganaattaactanagtgtacct

SEQ ID NO: 5197 - DNA, 311 bp, Glycine max
  unsure (1)..(311): unsure at all n locations; Clone ID: 700560569H1
cactttcttttttcccgcagtcatggggcaaggtcaagatcggaatcaacggatttggaagaattggccgtttggtggccagggtggctctgcagagagacgatgttgaactcgttgccgttaacgatcctttcattaccaccgattacatgacatacatgtttaaatacgacagtgttcacgggcactggaagcatcacgatgtcaccgttaaggntgagaagacccttctcttcggtgacaagccagtcactgtttttggacacaggaaccctgaagagatcccatggaagngactggagctgacatca

SEQ ID NO: 5198 - DNA, 307 bp, Glycine max
  unsure (1)..(307): unsure at all n locations; Clone ID: 700560570H1
gcagaagaacaantagttgagnactaagaaggngangcaaatgggcttcctcaatgatctcttccccagctgttaccactgtcaancgtgccggtgccggcatggttgcnccattcactggcctcaagtccatggctggcttccccaccaggaagaccaacaatgacattacctccattgctagcaacggtggaagagtgcaatgcatgcaggtgtggccaccagttggcaagaagaagttnagactctttcctactgccagaccttgatgatgcacaattggnaaaggtagagatacttcttaggg

SEQ ID NO: 5199 - DNA, 311 bp, Glycine max
  unsure (1)..(311): unsure at all n locations; Clone ID: 700560571H1
aacaanggaangtaccctgcaaatcgcaaagnngaaagtccctctcattcctcttctgtctattctctggttcatttccattttcttccttctctcccagttcaaatctacctccagctcccancactcccttcncacgttccaaatcgagaaacacgaatancaccgcngttcctgcgactactccgacggaacatggatccacgacccctcgangactccgangtacgacaatacctgcnaggagatcttcaagggctggaatgcctctccgnncacaaatcnaacgccccaatctctccacgtggcgt

SEQ ID NO: 5200 - DNA, 308 bp, Glycine max
  unsure (1)..(308): unsure at all n locations; Clone ID: 700560572H1
aaacttcgaccaaaggttcatgtangtaaaggactgantgaagtaaatggaagttctgatgttttaggtgagcaaaatcggggcccgagaattagtaattataagtcaaaatttccactggctgtcaaagcctatgcaaataaaggagatgacaatacacaagagaatatcatcatttctactgatcaatataacagggaggatttccctgtcaattatgaaaatgcaaagttttttgttataaaatcgtacagtgaagatgatgtgcacaaaagcataaatataatgtgtgtcatcaacacctcagg

SEQ ID NO: 5201 - DNA, 309 bp, Glycine max
  unsure (1)..(309): unsure at all n locations; Clone ID: 700560573H1
tcttcacaagtggcaaatnccaatcnccagcncggtgcagaaaaaccatgaacacgccgtggcgtcggaattgaatggcgcgcgtggcacgtgtcaaacgcgacgacagttttcttctccaattcnannnnnnnnnnnnnnnnnnnnnnataacatagacggcgtgttcttctttcaaaacccggttcatctttcttttntgttgctgccatattcctcccattttttttccttccttcaatctgctgnttcaatggaaggtttggcttctctcagggttcnctttcagaccaccaattccatcttcca

SEQ ID NO: 5202 - DNA, 306 bp, Glycine max
  unsure (1)..(306): unsure at all n locations; Clone ID: 700560574H1
ctttattgacattagaaaatggtgggttccctattcaaaatccnttctactgcagctgaagatgcacgattagcatctcttatttcacttgatagcatattaaagcaaatcaaggatataataaggcttcttccgtgaacatcttgagcaaaagtaagaaaaaaacgatgctacttctctgaatgaattaacagagcagatgccttcgcttcttgaaattgatcatccatgtgctcagaggcacattgcagatgctcactacttggttgagtcaattcctgaagaagagaccccattcaagatatt

SEQ ID NO: 5203 - DNA, 305 bp, Glycine max
  unsure (1)..(305): unsure at all n locations; Clone ID: 700560575H1
aaaaacatggaaacaaccgtgatcaaagggcagctcctatagttaatggtaataaggtttggagccgaaaacctanaccaganactaatggggtggtttaaaagccaaactgcaganagaaccagacaaaggtaagagtcatgaagttttgataggatctgtatcagttagtctggattattgcagcagncattcacaagggaatttggtggcagcccagcgggactgcgtggtagagaatctagccaagcagaatactgctcangaaaagccagtgaaacatgattctttcagggaagtaatgg

SEQ ID NO: 5204 - DNA, 303 bp, Glycine max
  Clone ID: 700560576H1
atggcaacgggactttagttccatccccataaattgatattagtccccttttgggctaaggcagatgatccaaaaatggctgaggatcctggtgtgcttgaggttgttaaacaattggataaggctgtacagaggcagggttcttctacgtgaaaggacatggttttcctgagactctccttaaagaagttagagatgtaacgcgcagattctttgaactttcatatgaagaaaaggcgaagatcaaaatgactccagctgctgggttcagaggtatccaagcttgggaaatataactaaagt

SEQ ID NO: 5205 - DNA, 302 bp, Glycine max
  unsure (1)..(302): unsure at all n locations; Clone ID: 700560577H1
ggcactcttaaaccctaaaccttggcttgcggcgtgggaggttgcaaaaatggaggaagcaagagttctgaagaatttcccggtgaagccaaagctgaaatcganagccagaacccctaagcaaacccctgaatccaagtactggtcctccttcaagacccaacaaattcccaatctcatctccgttccttccatcacgttctctccgacaccccctcactctttcgccgccgcacattccgatccctcatctcttcagctcccaaacgtctcccccgnggcaacattctcttctccgangg

SEQ ID NO: 5206 - DNA, 307 bp, Glycine max
  unsure (1)..(307): unsure at all n locations; Clone ID: 700560578H1
tgattagtgcgtgcgattcattgtgtttgtgtagtagtgagnncactttgggttgggtttcgtctcaactcaacaaacgtcgtcgttctcccatttccaatctttctccaatggcttcttctgcttccttaatcaactcgttgacttgctcttcgcctgcacccactcagcactgtttcgccttcacccgcaccaccgccaccgctaccgccacgtcactgagacaattcaacagccaccgtccgcccccactcaccacgaggatctcctcgtcgccttccaccgttgtcgcaaagtgtctccgtta

SEQ ID NO: 5207 - DNA, 119 bp, Glycine max
  unsure (1)..(119): unsure at all n locations; Clone ID: 700560579H1
tcttntttctaacttaggattccntctccaacaatggntctcgncngtttcnactattcttccctcttcagcagtgttgcagttctagctccntcttctctcgtntcggatcttcctcc

SEQ ID NO: 5208 - DNA, 313 bp, Glycine max
  Clone ID: 700560581H1
atcataatggccgcctcagcgatggtgttggatccgccgcccttcctcccgtcgacaaagtccgcctacctccaaggcggcgacgccacggccttcgatgaggaagatctctacagccgcctcaaatccctagtgcgtcagtcgagttcgtcgacatccaggaggagtatgtgaaggacgaactgaagaatctcaggcgcgagtcctccgcgcgatggaggaggtgaagcggatccagtcggtgccgctcgtcataggccagttcatggagatgatcgaccagaacaacggcatgttggatccaccgcaggat

SEQ ID NO: 5209 - DNA, 308 bp, Glycine max
  unsure (1)..(308): unsure at all n locations; Clone ID: 700560582H1
aactctctcctcccctgcttccacgtctgnanctcaatnttcagggctctgaattgcctagaaganagctttgtaaganatcntcacacactattntggcatcacctacgctgcctaaaccatttcttcanatttatggtagacctcagacattnctttataggtcaancagantctcttctggagcacatagagtaacaatatcagctgnagtggcagacnnaattgggatttggnagatttgtnaaaacaccgttcttcttcnatgggttccanntctgctnagttctggactttctagttganca

SEQ ID NO: 5210 - DNA, 308 bp, Glycine max
  unsure (1)..(308): unsure at all n locations; Clone ID: 700560585H1
aagatatgggatctggatttaaatggatccggattggattttccatgtccgcccttaaaaataacctgtaattggaggtttttaagcggaaaaagttaaaataacagataaaaaantatcttacattaccgagtgattgacgtcaaccgcaaaccatctccacttcttatctccggtctccgacgaactctccttggnatttgtactgcagaggtgctgccttttacaccaccagattttgcagattttagtttttaaggttatgcttttgggttctgcgactaatgttgcgatgatcatcactgcgg

SEQ ID NO: 5211 - DNA, 304 bp, Glycine max
  unsure (1)..(304): unsure at all n locations; Clone ID: 700560587H1
taggtcctgtgctatcactcacttgccctcatgataaccaagtcatctcttccattaaatttgctagctatggaacaccccttggaacctgtggtaacttctaccacggacgctgcagcagcaacaaggctctttctattgtgcagaaggcctgcattggatcaagcagttgtagtgttngagtatcaagtgagacattcggaaacccttgtagaggagtggcaaaaagtttagcagttgaagctacttgtgcgtagacagacatgtttcttcaataacactcccaatttctgaagatgatccc

SEQ ID NO: 5212 - DNA, 305 bp, Glycine max
  unsure (1)..(305): unsure at all n locations; Clone ID: 700560588H1
acaagatcgggaagccccanaccgtcccgtgcaaggntacggggaagtgcggcnccgttaccgttangatggttcccgcgccgagaggttcggggatcgtggnggctanggttcccaagaaggtgctgcanttcgcggggattgatgatgttttcacctcctccagaggatccancaagacnctcggcaacttcgtnaangctacttttgattgcntgatgnaaacctatggattcctgacaccagaattctngaangagatcgcttctccnaatctncattcnnagatacacagatctannggc

SEQ ID NO: 5213 - DNA, 81 bp, Glycine max
  unsure (1)..(81): unsure at all n locations; Clone ID: 700560590H1
aaagnnggtgcataactgaacaaacaaagcaaccctatgtcgaaagtggttgtgtcaccggagccagtngcgccntggatc

SEQ ID NO: 5214 - DNA, 287 bp, Glycine max
  unsure (1)..(287): unsure at all n locations; Clone ID: 700560593H1
ccgtgaagaaggattatgtggataagatatcttctggagggatgctcatcaatgacgccgtcatccatgttgcaactcgtgggntgccttttggaggagttgaagatagtggaatnggttgttaccatgggaaattctcttgtgatagtttcagccacangaagtcagttctctatagnagttttgatgcagatctancattaggtaccctccgtatacacctcagaaggncaaattattgaaggnccctattagtggcaatattgttcnattatncnttctcngtg

SEQ ID NO: 5215 - DNA, 302 bp, Glycine max
  unsure (1)..(302): unsure at all n locations; Clone ID: 700560594H1
ccttggctggcaaggccgtgaagctgggcccatcagccccagaagtgggaagggtgagcatgangnagaccgtcaccaagcaggtctcctcaggaagcccatggtacggcccagaccgagtcaagtacttgggcccattctctggcgagcccccgtcctacctaaccggtgagttcccaggcgactacggctgggacactgctgggctttccgcagacncagaaaccttcgccaagaaccgtgaactcgaagtgatccactccaggtgggccatgctcggagccttggtgcgtttcccgntt

SEQ ID NO: 5216 - DNA, 309 bp, Glycine max
  Clone ID: 700560601H1
accatttccaactaccaactactctcctctatcactctcccatggcttcctcttccctctttctctcacttctctctcaccctttgccttgtttcctctctctgctatgctcacaaatcttccttaaccctacctgtgacaaaagacgattcaacccaccaatacctaacaaccctctcttatggcacccctgttgagtctgcaaaattcgtgcttgatctcggaggctcaatcctctgggctgactgtgcatccagaaccaccccatcttccacccttgccccaatcttccaccgttcaattcgctgc

SEQ ID NO: 5217 - DNA, 303 bp, Glycine max
  Clone ID: 700560602H1
gtcattttactttgtaactgtgaccgtgttccggtactcggtttgttactgagttcaatttttacgaattttcgtgcaggaacaagggaatactattcgtggctgttgaccacaataggcctctttcagatcaaggtccttttgatattgtcttgcataagttatcagggaaagagtggcgccaggttcttgaggattataggctgtcacatccggaagttactgttctggatcctccagatgccatacaacatttacgcaaccggcagtatatgcttcaggctgttgcggatatgaactttc

SEQ ID NO: 5218 - DNA, 304 bp, Glycine max
  unsure (1)..(304): unsure at all n locations; Clone ID: 700560603H1
acataacatcctcaagcctttgaacatcgttttgcagccatggaaacaggcatagcatgctacactcgcgggcctttcctgcctagtgtttcttccaagcactctccaccctccatctctccatcttttgngcttgaggagtctgaaatcgagctctttatttggagaatctctaagagtggcatccaaatcaacactaaaggtttcaaagacaaagaatacttcactcgtgaccagatgtgaaattggtgacagtctggaagaattcctcacaaaagcaacaccagataaggggttgatcagg

SEQ ID NO: 5219 - DNA, 303 bp, Glycine max
  unsure (1)..(303): unsure at all n locations; Clone ID: 700560604H1
atnctgcangctgcnnnangnngacatcaagactaaaatttcaanagtttatatngnngacagtagcatctggancatgagccttattgtgaaagatggatatcaatggaggaaatatggnctgatgtgacnagggataacccttctccatgagcatatttcaagtgcncttttgcnccaagctgcccggtcgaaagcaggtgnaannagtgtggatgatcaatctgtnctggttgcaacttatgtangagagcnctatcatcctcacccttctcaaatggaggtancaanaggctccaaccg

SEQ ID NO: 5220 - DNA, 297 bp, Glycine max
  unsure (1)..(297): unsure at all n locations; Clone ID: 700560605H1
gccattgctgaagctggtgcaatacctctccttgntggnctntgtctgtgcctgaatcccgnactcaagnacatgccgtgacagcggtcctgaatcttccatatatgaaaacaacaaaggnagtattggttcttcnngagcagntccaggtatagntcatgtgctgaagaagggaagcatggaggntcggaaaatgcnacngcnacacntttcnnccttcagtaatagatgaaaccaggttacaattggatccttaggagccatancaccatagtgacactgctaagtggagggnac

SEQ ID NO: 5221 - DNA, 300 bp, Glycine max
  unsure (1)..(300): unsure at all n locations; Clone ID: 700560607H1
gttttctctgtcttcattttagtttttacggctagaagaatgtccagctcatcggaatatttggtattttccggccaccacccggcgaactctccggcggaaaagtccactttctctcagacttgtagtctattgagccaatacatcaaggaaaagggtaccttcggagaccttaccctcgggatgacttgcnntgccgaaacaaacggttcccctgagacatcgtgtcactctgcaacaaccanggagttgtttcccacgatcatcacgcaacggaacccaactactgtggattcctat

SEQ ID NO: 5222 - DNA, 286 bp, Glycine max
  unsure (1)..(286): unsure at all n locations; Clone ID: 700560608H1
ctganntgngtnggnntcacagcngatatggcnaagctcangctaanatcatcggtgataacgcntcaaaatcangttatcagtgtgtcaccctgacttttcannncacaattntctgntgcttnatntctcactgtgatttcatactaggttttcggtcatcttagttgactccaagcnggtanatatctnntgcctccacgcatngctaccctcagatcttcanacacnagactacctcnatnantcgactnaagcntcattcancatcgngtcgtgttgngtt

SEQ ID NO: 5223 - DNA, 307 bp, Glycine max
  unsure (1)..(307): unsure at all n locations; Clone ID: 700560610H1
ctttggttctctagggncagtcnggtgntcnggggggnntantaangnnnnntagttcnacttcttgaagatcctgaattgcgggctgaaagaaaagaagtcattactggccaactgttcctccaaggaaactgtgaaaacaataaccttggcgattaattttgtccaagcccacagtctggggctctgatagtgtccccatttttgcccacaactgggggaactttcattctacttnacatggatgccaacatactataaccagtcttgaagtttatcttacagaatctgggctatttgtgtttac

SEQ ID NO: 5224 - DNA, 305 bp, Glycine max
  Clone ID: 700560611H1
ataataataagctccgacgacagcagatcataagcggcagttcgttcccacgttggttgtccgctctgtgggctctctacatttcatcattcatcggaaaaatggctctcgaggttgctgttaaggctgctgttggtgctccaaatgttctcggagattgtccattttcccaaagggtcctcttaactttagaggagaagaaaatcccttacaaactccacctcatcgatctcagtagtaaacccgaatggtttttgggtgtgaatcccgaaggaaggtgccagtggttcttttgatggcaaatg

SEQ ID NO: 5225 - DNA, 286 bp, Glycine max
  unsure (1)..(286): unsure at all n locations; Clone ID: 700560612H1
gtggtaatggntctggtgggggagggaaggngcgggtaacgaactggttcggaantttgacacgtgcggcgtgtggcgaacctggctcgggcgacgccacctacgccaacttcgcacccttcctctcttccccttccgttggggatccttcataacctccaccactcacatcctctccaacncagagtccgcggcctctcttcgataaagccaccgtttcctctccctaaacctaacctaancctaacctatctcctatctccaagtctcaaccctattactccaa

SEQ ID NO: 5226 - DNA, 316 bp, Glycine max
  unsure (1)..(316): unsure at all n locations; Clone ID: 700560613H1
actggaatttccaatcctgagaccgcaaagaaatnataacntcaaaaccttatttcttccagtgtcgtttttaccaaaaacggccaaatcgccctgtagactgtacactgagactggttttaaagcaacgccaacttgtttccagccatgcctccttcaagaagacccaacaaacctctgtttatcggagggagcaagaagagacagcctacgattcctcggagaaggttgtggtggtcggaatcgacgagcacgacggcgacttggaggcgccgccgttctcatggcggaactgtggctcttcaccgggcccggg

SEQ ID NO: 5227 - DNA, 304 bp, Glycine max
  unsure (1)..(304): unsure at all n locations; Clone ID: 700560615H1
cttctttccaaatcccaactantactcacactcnctgcaagncntaatcccatggnaaccattgttagcatccaaggcccgcccagatctttgacagtcgtgggcaatccaaccgtcgaggtggattgacatgctccgatggtacttttgctagagtgctgttccaagtggtgcntccactgggattatgaggccctgaattgagagatggaggatctgactaccttggaaagggtgtatcaaaggctgttgacaatgtgaacaccattattgcccctgctttggttggcaaggacccaactca

SEQ ID NO: 5228 - DNA, 282 bp, Glycine max
  unsure (1)..(282): unsure at all n locations; Clone ID: 700560616H1
ccgggagggtttttgggtgacgagacactttccatggtgcantcgtcggccgttatcgacagacttccggcctcctccgccacatttgtatgtcttgaatcagcagaagccttggccttgatgccaataacttgaggtacatcactgatcacttccggtacaaattgcaatgagaggngaaagnnnncngcaagatattactcatccaattggagaacttgggctgctgtcaacattcaatttgcttggagacgttacaggcagaggataaaggtcctgtga

SEQ ID NO: 5229 - DNA, 292 bp, Glycine max
  unsure (1)..(292): unsure at all n locations; Clone ID: 700560617H1
actaagnnttggtntgtgatttgnagctttggtganagagtggatatggncgnacggtacganacttnnaggagcttggttcagggaacttcggagtggcaaggttggccaaagacaaggagacaggagaacttgttgccatcaaatacatagaaaggggaaaaaagattgatgcgaatgttcaaanggagatagttaaccaccgatctttaaggcatccaaatattatcaggttcaaagaggtgaagagtttgtntctatacttaaactgttctttgagtgtgattttttc

SEQ ID NO: 5230 - DNA, 300 bp, Glycine max
  Clone ID: 700560618H1
tctctctcaccaaagccttcctagaacgaaaaaaaaaaagaagagcaattttccctcaccaaagaagaagaagcaaacaatggccgatcaacttaccgatgaacagatctccgagttcaaggaagccttcagcttgttcgacaaggacggcgatggttgcatcacaaccaaggagcttggaactgttatgcgttcattggggcaaaacccaactgaggcagagctccaggacatgatcatgaagtggatgctgatgggaatggtaccattgacttccctgagttcctaaatctcatggcc

SEQ ID NO: 5231 - DNA, 300 bp, Glycine max
  unsure (1)..(300): unsure at all n locations; Clone ID: 700560619H1
accacattcacctgagctttttgtgaggattccaaagcatggcttcccttgnagcatccactgctgctgcttcccttggcatgtcagaaatgcttggaaaccccatcaacctcagtggtgccacaaggccagctccatctgcctctagccctgcctccttcaagactgtggctcttttctccaaaaagaaggctgcacctccaaaaaaagctgcagctgctgctcctgccaatgatgagcttgccaagtggtatggtcctgacagaaggatcttcttgcctnagggtctcttggaccgat

SEQ ID NO: 5232 - DNA, 299 bp, Glycine max
  Clone ID: 700560620H1
gcatctacaagttgtgcagatagtccagctatatcttgtgtgcaactagaagttgaagatcagcctaagtcacctggaatcaacatgaattctgagccatctgtagttgctgttcctgatcttgatgcatcaaaagaacaaccagtgggaaaagcccctgtgactactggtgttaatgacatattctgggaacgattcttgacagagaatcctggttcatctgaaatgcaggaagcacagtctgaaagaaaggattctgatggcagaagtaatgccaaattttggtggaacattaggaa

SEQ ID NO: 5233 - DNA, 298 bp, Glycine max
  unsure (1)..(298): unsure at all n locations; Clone ID: 700560621H1
gaactcatcacttactggaagccttgttgtgagtaagagaaaaggcttcctgcaccgagcacaccaacttgatacctctgattctttctttgcttagaattccacagaatatggagacngttcttntcaatcactccccacctttggaattcaagggtttgagcaaggaggaggaagactcattgctagggcaagtggaaatatggaggtacatgacatgcttcacggactccgtggccttgaaagctgtcatagagcttcgtatagcggacatactagaccgttatggtaaaccata

SEQ ID NO: 5234 - DNA, 298 bp, Glycine max
  unsure (1)..(298): unsure at all n locations; Clone ID: 700560622H1
gacagcctatctggncgccatatacatggctgcaccgtttttctcaacgccctttcagccttatgtttatcagagtccgcaagatgcaattataccttttcagattttagggggtgaagctcaagtggttcagataatgttgaagccacaagaaaaaatcatcgcaaagcctggttctatgtgctttatgtctggatccgttgaaatggaaaatgcctaccttccagaaaatgaagtaggcatatggcagtggttatttggcaaaactataactagcattgtacttcgcaattctgga

SEQ ID NO: 5235 - DNA, 298 bp, Glycine max
  unsure (1)..(298): unsure at all n locations; Clone ID: 700560624H1
acgcanccaacanccaaccttcagtntctcagcaacttcgctttaacccgtgacggaaaaactcaaaaagcagcgtaaatcaaaatccttggaatcccttttgattccctcacttcagttttcaccttattcatctcaaagatttctcctttctctcctttcctctctctttcgccttctgggtgttttcaaaacgcgcttaaaaccgtgatgggtgccgtcgtcgagtgttacccacagccgcgcacggcgtgctgtccctgaacaccttgccgttaggttccgtttccgtcccacg

SEQ ID NO: 5236 - DNA, 302 bp, Glycine max
  unsure (1)..(302): unsure at all n locations; Clone ID: 700560625H1
gttgaatcatgcgcaccaaggtnactccaaangggnttgttnggagttggtaaacgaattgtacatgtagaatcattgcttgcaattagaagccgcggatgttcgtattattggaatctggggcatanggnggtattggtaagacaaacattgcacaagaagtttataataaactctgttttgaatatgaaggttgctgttttttggctaacataagggaagagtcaggnagacatggaataatctcattaaaganaaatctttttccaacattattaggagaggatatttgacaattgacc

SEQ ID NO: 5237 - DNA, 300 bp, Glycine max
  unsure (1)..(300): unsure at all n locations; Clone ID: 700560626H1
tgactacttgggatactatgatnaacacagcttgctaagaatgggtttgcccgaagattcaattgatctatttactcaatttaaaaacttgggactgaaacctgatggggcagatgttcattggagttcatttgcatgtagtgtgctgggagatattgacgagggaatgctgcactttgaatcccatgagcaaggattacggcattgtaccatctatgactcattttgtcagtgtagtagacatgattggcagcattgggcatctggatgaagcctttgagttcatgaaaggatgcccaa

SEQ ID NO: 5238 - DNA, 210 bp, Glycine max
  unsure (1)..(210): unsure at all n locations; Clone ID: 700560627H1
aaaaaaaccttcaccaacaacttnataaaaccngtcccttctcttctcctttccnaaatcnatttgatcactcctgtattgngttttgttccttccttggttcgtnccctccacaaaccaaaaanccaacaaaagaacgttcattttnnattttcgtttcnaataaagagatggccggtggtntattcggagacattctttctcggaaga

SEQ ID NO: 5239 - DNA, 293 bp, Glycine max
  unsure (1)..(293): unsure at all n locations; Clone ID: 700560629H1
atttctctctgtgtatttccctacctctcccttcaagatgcagatcttcgtcangaccctcaccggcaagaccatcacccttgaggtggaaagctctgacaccatcgacaacgtcaaggccaagatccaggacaaggaaggaatccccccggaccagcaacgtctcattttcgcnggaaagcaacttgaggacggccgtacccttgctgactacaacattcagaaggagagtatcttcacctcgtcctccgtctccgtggtggcatgcagatcttcgttaagacactcaccgg

SEQ ID NO: 5240 - DNA, 261 bp, Glycine max
  unsure (1)..(261): unsure at all n locations; Clone ID: 700560631H1
aactgtctttacttcggtgtcgggcacaagccccagaatccccatcactctacaacaccttcctttcaatgcctcaccaaatacacaantaacccctccaacatagtcttcgccaacaccaaccccaagttccccactatcctccaaaatacatccgaaacgcgcgtttcaaacacctcctcgacgcgaaaancattactcatcgtcatccccagcaagaatcacacgtccagggcacagtaatctgcggcaaaagggtgt

SEQ ID NO: 5241 - DNA, 299 bp, Glycine max
  unsure (1)..(299): unsure at all n locations; Clone ID: 700560633H1
gaaggcatggagcagtggtggatgtggtcgggtaggagcactanagatgggaagctgnccggnacccatatgnganangcgntcttctcctatcnatncgtnganggcctctccacgttatctcccccggngtactcactncnctcacttcccccgantcccatcnccttcaaatntcgccactcnncttgctngnaggagntggctgtcaactactatgncncaattaggntggttcagcaaangattgtgtgngcaatattgtgtggnggctatagcatggggnccacgaaangnnt

SEQ ID NO: 5242 - DNA, 288 bp, Glycine max
  Clone ID: 700560634H1
gtccaaggctgtgatcactggctacaaagatgggttcaaccagattaagtccttggttgatgttggaggtggcattggagggtctctttcggagattgttagggcttatcctcatatcaatgccatcaactttgacttgcctcatgtggttgccactgctcctaagttcgatgggatcacccatgttggaggtgacatgttcgtgtccattcctagtgctgatgctatttacatgaagtggattctgcatgactggagcgacgagcactgcatcaagatcttgaagaa

SEQ ID NO: 5243 - DNA, 288 bp, Glycine max
  unsure (1)..(288): unsure at all n locations; Clone ID: 700560635H1
agaagccataaaaaaactgatgaggatgatgaaggtcatgtgtctgataagggagaggangatgaagaggaggaatcaganaggaagagtagacttggacttaataaaagagctggtgaagatgatgaagaaggtccaaggggaggggaccatgatctagatgacgacgatgttgagaagggcgatgattgggagcatgaagagattttcactgatgatgatgaagctgttggcaatgatcctgaggaaagggaggatttggctcctgaagttcctgctcctcctgaa

SEQ ID NO: 5244 - DNA, 244 bp, Glycine max
  unsure (1)..(244): unsure at all n locations; Clone ID: 700560636H1
gttttcttgtactcaagggcaaagaggatcaagtcagtccaaaagacaaattgtgtctacaatatttacttttccctctgccnnnnnnnnnnnnnnnnnnnnnnnnnnnacattttgtgagggtatcactactccttgttaattggccatcctatgcgactaaatcttagtaaataatataggagtttaatagacatgtactgtaagtttaattttttttacaaatattcagaaatctttattg

SEQ ID NO: 5245 - DNA, 258 bp, Glycine max
  Clone ID: 700560637H1
tccgtggaacgagtagtagaaacttgaaatcaaaaggcagcgggggaaaaagaaaagagagaagtagggttcgaaaatggcagcagaatcatcagagggcgaagaagaaaccaagttaagcggaggtaaccaattgctcatagttgacgatgacttaacggaaatgggaaagaaagccgcttggagcgtgagttcctgcaaacccggtaacggcgtttcctctctccgtgacgacaatctcgaaacttattggcaatc

SEQ ID NO: 5246 - DNA, 276 bp, Glycine max
  unsure (1)..(276): unsure at all n locations; Clone ID: 700560639H1
ggaactttgatgtcaagggcagtgatttcaacaactcatcaaagccttttgatgatgatttcaatgatggctggaagatcaccaattccaatggaccccttttctctatgcctcacaacaataacacnccacactcttgaagttggaggcttcaacaagggaggaatctattccaacaccaacaccactncctccttatatcctaaccttaacaacaacactcttggaggcttcaacaagggaatctattccaacacnannccctcancctatctt

SEQ ID NO: 5247 - DNA, 297 bp, Glycine max
  unsure (1)..(297): unsure at all n locations; Clone ID: 700560641H1
aagcttttcacatggaaatcggctcccccgcattccttaccctcgaagactattcttccttcttcttccctganatggatcccattcccaattccaatgtcaacaagcgtcgtgcaaacaacgaccagttcgacttaaatgactccgcattcagccacctcctcaattccatcatggatcctaaccatttccaacaccaatccaaaccaatccaattcgactcctccccgaccaagagagtcgccgtgacctcctcgttctcgaagacagccacctcaaccccgcctcggccccgca

SEQ ID NO: 5248 - DNA, 107 bp, Glycine max
  Clone ID: 700560643H1
cttaaactacattccccatttgtttttgctttttgagatttcatcatccctgtatttttggtttctgttttcggacttcaatggaaattaatggatgagaactaatg

SEQ ID NO: 5249 - DNA, 238 bp, Glycine max
  unsure (1)..(238): unsure at all n locations; Clone ID: 700560644H1
cgagaacagaaatctcgtgtggaacaaaagggtaaaagntcgtttgagctcattttagggacacctgcgttatcttttnnncgatgtgccggcccagtnaaactccncatctgnccaatgtcttccgcccggatcgaccggnngnagccgaccttgggtcnaaaaagangggcagtgcccgacttccgattcacggaataagtaaaataacgttanaagtagtggtatttcactttcg

SEQ ID NO: 5250 - DNA, 298 bp, Glycine max
  unsure (1)..(298): unsure at all n locations; Clone ID: 700560645H1
tttgggtgttccacaagattacaaggcatatggntggtttggagttaacacatatacgctgatcaacaaggctgggaaagcagtgtatgtgaaatttcactggaagaccactagtggtataaagtgtctattggaggaagaggccattaaggtgggaggagccaaccacagccatgccactcaagacctcccatgattccattgctgctggtaactatcctgagtggaaactgtttgttcagacaatagatcctgagcacgaagacaaatttgactttgaccctcttgatgttactaa

SEQ ID NO: 5251 - DNA, 300 bp, Glycine max
  unsure (1)..(300): unsure at all n locations; Clone ID: 700560646H1
aagctagctcagggctgggattaagctatgggttttaactggtgatnaaatggagacagcaattaatattggatttgcttgtagtttactcagacaaggaatgaaacaaattataattagctcagatactccagaaactaaatcattggagaaaatggaggacaagtctgctgctgaagcggcaattaagtcaagtgttcttcgtcaactaagggagtcaaaggcattgctttctacagcagatgaaaactatgaggccttagccctgatcattgatgggaagtctcttacttatgcact

SEQ ID NO: 5252 - DNA, 158 bp, Glycine max
  unsure (1)..(158): unsure at all n locations; Clone ID: 700560647H1
ccagaattaggtgtnaagtncagcaattcacggcccaccacttagcatttgaaggttcgactaattgaccttcagaaatcgtggccgtaaatatctttgattattctttttcattttgtacattgtaatttgatcatatacgattgttatgaagtttg

SEQ ID NO: 5253 - DNA, 287 bp, Glycine max
  unsure (1)..(287): unsure at all n locations; Clone ID: 700560649H1
aaagtttcttcctttctctgctctttgtcttctctgacacatttggggccttgttgagtgtgtttttgcaagagggtatggcgaaggacgttgaggttgctgagcgtggctccttctctgggaaggactaccaggaccctccaccagcaccactcattgatgctgaggagctcacaaagtggtccttttacagggctcttattgctgagttcattgccactttgctcttcctctacattactgtgctcacagttatagggtacaagcaccagacggatcatgctgnt

SEQ ID NO: 5254 - DNA, 298 bp, Glycine max
  Clone ID: 700560650H1
ctgagcaatgcctgtcacaaacacaacaacaccaactgtggcagaacacatcaaatggagaagacccagaaaccaatttcaaccaccatcagcaccccatttcagaaaccgatccaaaccctcaaatcccttccattatccaatccactaggtgcaagtctaccatttcctccttgctcctctccactttctccaacaacacctcctccaacaatgacactcccaccaccttcaatgccactgcccatagcaagaaaaaaagcaacttttctgcatcaaccttcagagggttggggtg

SEQ ID NO: 5255 - DNA, 293 bp, Glycine max
  unsure (1)..(293): unsure at all n locations; Clone ID: 700560652H1
cccaactcaatttttctctcaaccggcccaatttagcataagcccagcatggccaccgcaacagcagcagncacctcgtccttcatggggacgcgcctcctggaggcccactccggggcggggcgggtgcaggcccggttcgggtttggcaagaagaaanccgccgccccgaagaaagtttccagggggtcgggctctagctccgataggcncctgtggtatccgggcgccaaggcgcngagtacctggatnggagccttgtcggagactacggnttcgatcatttnggctag

SEQ ID NO: 5256 - DNA, 292 bp, Glycine max
  Clone ID: 700560653H1
aaaagagcactgaccaaaccattttattttatttttgaatcaagggtgagggccttccatggcttccgcttgtgcttcctctgcaattacagctgttgccatctctacgccgagttccgggcagaagaatggatcaggaggttgttttcttagtggaaggaaattgagggtgaaaaaggagagagcagcaattggaggacgatcgatgggcactacagtgtgcgcagttgctgagcctgacagacctctatggttcccaggcagcacccctcctccatggcttgatggcatc

SEQ ID NO: 5257 - DNA, 295 bp, Glycine max
  Clone ID: 700560654H1
cctcaagggtccctaacggcaagattttcttctggaagttttcaaaatcgttgccgcggaaaaagagattgatgagaaacaacagacagacaaggacagatggaaaggtcttgcctatgatgtttcagacgaccagcaagacatcacaagagggaagggtttggttgattccctcttccaagctccacaggatactggaactcactatgcaatcatgagctcttatgagtacctagcactggacttaaacagtacaacttggataacaacatggacggtttttacattgctcctg

SEQ ID NO: 5258 - DNA, 276 bp, Glycine max
  unsure (1)..(276): unsure at all n locations; Clone ID: 700560655H1
gctatttccacccaaaacaagtggantgttggngtgtgccacttgngcttgaatgagangctcctcatacttgctgcaaaacaagacnatnataatcatcntcacaggcttcaaagttccactcagaggaaggcttcagcttctattcacaagatctttgcttttggntctcttttcactcgccaccaattganatcgcacaactattatgatcaagatgatgcctctcccagcccagaaggaaagaccttatnttactcattaatgcctgctttt

SEQ ID NO: 5259 - DNA, 297 bp, Glycine max
  unsure (1)..(297): unsure at all n locations; Clone ID: 700560656H1
cattttnccccattttgtgaaattcaattccaagggtttccattttccatttcaatgtcttcccattcgcacaaaggcacctccttctacggcgatgccgccccttatcgatccagagangggcttagcactcganccgtngcatcctccgatgaaatccaattncacatcgatcccggcatcgacttcnacgacgaaatcaccggtcttcgtggccaagttaaaaaattgnnaaatgttgctgaagagataggttcagaagtcaagtttcaaagagattttctggaacaagtgcaa

SEQ ID NO: 5260 - DNA, 288 bp, Glycine max
  unsure (1)..(288): unsure at all n locations; Clone ID: 700560657H1
acccagctcatttaaggtgctcnacagcatcatctgcatcnatancntcntccttaattgtggagacnccaacattcatgganttccccnttggtgncncnaagaccntgtttgcccaaacaaacacacatggnagatgagcnttgtggtatcggggctatcacaattgtggactagtagtcagaggcaacactagctatggaatactgtccggagcngaaaaatataatgatgggatcgcaaccatcagggagtattgttgatcagatgtgggagtgtgcaacgatg

SEQ ID NO: 5261 - DNA, 293 bp, Glycine max
  unsure (1)..(293): unsure at all n locations; Clone ID: 700560658H1
ttttcatttcagaataggnaccnatggctcntttgctgacaacaagtcctaacaatggtgcaacaggttctctccggcagagcccggnaagaggnccctctattcgttgaaaaatgtttatttccaacttcaagagtgtgctgcgttggtcaccaatatcancaatctcacccctcttccctctctgatcttgatcaagtccctcctcccggtggcaatcactctntgcgtcgcaggacattgatggggttgagtggtgcggcaacgttggggntgagttgagtgatgagcaa

SEQ ID NO: 5262 - DNA, 294 bp, Glycine max
  Clone ID: 700560660H1
aaattacaacaccaatctcacccatttcaaaaaaaggccgttagtgttactattcgtaaaatgggccaatcttgttcttaccaatttctttctcaaaactcttgctcctaatttcagtcttcagctttcctttgctgctaggagactcaaccagctggttcaggaccagtcacagttactccattaccacaacggtcctcttctatacggcaaaatcgccgtgaactaatctggtatggtcattcaaaccatcccaaaaggccatcatcaccgatttcgttacctcatgtcatc

SEQ ID NO: 5263 - DNA, 292 bp, Glycine max
  unsure (1)..(292): unsure at all n locations; Clone ID: 700560661H1
angataaagcatctttcnggcatgatcataacttaaatttctcnntctccaactgacaatggcccctggaagaattatttgataaagtgnaaagaatgttagtatgggnaaccaaaatgatgctatagactgctaactgcnaattatgaagtggtgaaagagcgcntaatgcannnncnaaaggcacagaagaagctgtaactttggacatcatagcaccaggttacatggctgttggagacttaaaatttgctggatcctgttgaacatggtatcccccnttcccctctgt

SEQ ID NO: 5264 - DNA, 289 bp, Glycine max
  unsure (1)..(289): unsure at all n locations; Clone ID: 700560662H1
gtccctgaatgctttttagagagagaaagagtcataataaagtgnaagaanaanganaaggagagtagtgaaacaagaagaaaggagaagaagatggtgtttgaggaaactgagctgaggcttggactgagactaggactccctggaaatggagccgcgccaacaactgaagctgctgcggaattaggagtgaggaagagagggttctctgaaactgaaaccgatgaaacaacctccgttgatttgatgcttaacctctctcccaaggaagcttctgctgctgctacta

SEQ ID NO: 5265 - DNA, 299 bp, Glycine max
  Clone ID: 700560663H1
gcaacatcatcaacatcacagaggtagagagtaagacgccggcaatgtccgctgtgagagttcaagtttcggcgtgtgcggtttccgccaccgtcaaccaccttcgcctccgccaaaacgccgtcgtttccttcaggaagaagaagcctctcactctcagagtggtctcaatgtcttccgttcctccttcccaacccttcgaaatcgccgttaaagcttccgtcaccacacccaacaggctcggcgactgccctttttgccaaagggtgctgctgacactggaggaaaaacatctacct

SEQ ID NO: 5266 - DNA, 280 bp, Glycine max
  unsure (1)..(280): unsure at all n locations; Clone ID: 700560664H1
gtgagtttgttgatcgagataactagaaacagtgtgatgaaaatgnaggnccatgttttcttcgntgctacnattttggnagcntngnaatgncangcgnacganangntccctcnccgnatgnacannnggnanggnggccgnaattcggaagtgaaatgcnncangtggaagnntgcngtgggagcncaccacatcttggcttgagacnatctgaagatggttgaacaacaagggatacatcatggcgaacaatatagatcagatccaaaacagttaa

SEQ ID NO: 5267 - DNA, 297 bp, Glycine max
  Clone ID: 700560665H1
cactactccttagtttctctcttcacatatcatcatacttagatagtcagatacatcacccaataattaaattaaatacatgctagcactttaacagtactcctttctctaatatctctcctcatattttcctttctgcggatattcagctaattaaactaagtcactaagatgactgagggaaagctagttgaagctgcagaagctcataagacacttcaggatttcgatcctccaaagaagcgcaaaaggaacaagtatgcttttgcttgtgctatgctggcctccatgacttcc

SEQ ID NO: 5268 - DNA, 292 bp, Glycine max
  Clone ID: 700560666H1
tagaatggctttgaagcttgtaaatctagggtttcactcatcgattccgtgttctccgaggcccttgaaagatcggttcgtgcttcggtcttctaaagtggagcaaatatcgtttacggaatctgagaactcactcatcgaagcccttcttggcatccaaggacgcggacgttcttcttctcgtcagcagctcaatgctgttgagcgtgctgttcaagtcctggagcggttagggggtgtacctgatccgacaaaatcaaacttgatcgagggtcgctggcagctaattttc

SEQ ID NO: 5269 - DNA, 292 bp, Glycine max
  unsure (1)..(292): unsure at all n locations; Clone ID: 700560667H1
atctactctctttttttcaaccttagattcnttcntccaacaatggctctcgccgtttccactacttcttcctctncagcagctgctncagttctagctccttcttctctcgtctcggatcttcctccgacgcaaaagctcctcaaatcggttcgtttcggtttccggagangtcgcttgtttcgtctgttgttgtcaatgtaactcaacgacgctccttggtgaggccactcaacgccgaaccgcaacggaacgattctattgttcctcttgcagcaatatcgttgctcct

SEQ ID NO: 5270 - DNA, 292 bp, Glycine max
  unsure (1)..(292): unsure at all n locations; Clone ID: 700560668H1
gaagaaaccaaaaagcaatcctttttttaggagttgtgccctacattacatctgaatttgattgataataaaagagtaaatattcgcccgcgataattttgattttattgaattttnttnttatttttgccaattctattnattctttctaataataaaaaatattctaataactaataataaaaaggaaaataaagattcattagantattatannataacaaataatagaacaaaacaagattctttagttatatatgtaaaananaaatggtttatttatnagantaca

SEQ ID NO: 5271 - DNA, 272 bp, Glycine max
  unsure (1)..(272): unsure at all n locations; Clone ID: 700560669H1
ataagatacangtggtgaagattgannactgagaagtatccnaaccattgctgacaaatacagaattgaggcgttgccgactttcatcatgtttaaggatggagatccttatgatcgctttgagggagcattgactgcagatcagctcattgaacgcattgaagctggcctcaaggttaagcaataaccctactataatgaagacacagaagcttgtctattggaatgttcgatcacatacatgatatgattgactggaatcacttgttgtt

SEQ ID NO: 5272 - DNA, 292 bp, Glycine max
  unsure (1)..(292): unsure at all n locations; Clone ID: 700560671H1
cgctcccgtgcagcttggaggacctctacaaaggagtcaagaagaagatgaagatttccaggaacgtctacgacgcttttggcaaatgtggggatgtggaggagatnttgactatcncagataaaacctggctggaagaaaggaacaaaaattaccttcccagagaaaggtaaccgtgagcctggtgtcatcccagcagatctcatttttgtgatagatgagaagccgcatgctctttatagaagggatggtaatgatttggtgatcaaccaagagataacccttcttgagg

SEQ ID NO: 5273 - DNA, 292 bp, Glycine max
  Clone ID: 700560672H1
gaaaattgctgtggagactgcaagtgcattgaattttcttcatcacaaagacgtcatccaccgagatgtgaaaaccaacaatattcttcttgacagtgacttttgtgtcaaagtggcagattttggactctcgcgtcttttcccagaccatgtcacccatgtttcaacagctccacaagggactccaggttatgtggatcccgagtaccaccagtgctaccagcttactaaacaaagcgacgtatatagctttggagtggttctggttgagctgatatcatccttgcctgct

SEQ ID NO: 5274 - DNA, 298 bp, Glycine max
  unsure (1)..(298): unsure at all n locations; Clone ID: 700560673H1
ctccattttgcatttagnaaatgacatgatgatcggggatagaaaccagaattggaaattggaagaccttctggttccaaagaatgggcggtgtgttagaaaatagacatgcacactgtaaagttaaatcacatgacgttactgatattcctccagacacaagaaagcagagggagccagggtctaaggataaagctgatcctgtaggaaagaaaaaggtccataaaggcagcgtaaaattcgaaaatgcaccctggaaattttagttctggagaaatctaggaacatgactagttac

SEQ ID NO: 5275 - DNA, 294 bp, Glycine max
  unsure (1)..(294): unsure at all n locations; Clone ID: 700560676H1
ggctcatcatctggaatttatttggcagtcatggattattcatcatggattaacactttccttggatctcaacattaatctccatagggttcacgaagaacttcccaaaaagcaggtggaaaacaattttttctcattggatttggaggtgaagaaatcttctgtaaaacaagagtcagcaggtgccttggcggaggaactgaagcgggtgagtgcagaaaacaagaagttaaccgaaatgctcacagagatgtgtgagaactacaacactttgcgaanaatttgatggaatac

SEQ ID NO: 5276 - DNA, 294 bp, Glycine max
  unsure (1)..(294): unsure at all n locations; Clone ID: 700560677H1
caanagggcactgactaattttcacnatcaactggnttcaaagtggttttntcttcctcttcttcatgttcattgattggatcccatcccaccccaattttctaatgctttgtctctcactctcccacgtgcactttcctctnctccgctctaaataattctccatnnnnnnnnnnnnnnnnnnnnnnnnaatacaatattatatgtgtgtgtggaaaaaagaaccgtntttcttttcagcgnaagcgaccacctntatattacccttttgatcagagtttaaaatggtgttgt

SEQ ID NO: 5277 - DNA, 294 bp, Glycine max
  unsure (1)..(294): unsure at all n locations; Clone ID: 700560679H1
cttgatttgaggccaggcaagccccactcaacnaccacacctctcctcgttcacgctacccctttctgctcttcttctaccttcaagttttaaaagtataaagatggcagagacattcctatttacctcagagtcggtgaacgagggacaccctgacaagctctgcgaccaaatctccgatgctgtcctcgacgcttgcctcgagcaggacccagacagcaaagttgcctgcgaaacatgcaccaaaaccaattggtcatggtcttcggagaaatcacgaccaaggccaacgtt

SEQ ID NO: 5278 - DNA, 288 bp, Glycine max
  unsure (1)..(288): unsure at all n locations; Clone ID: 700560681H1
atgggagtcttgtcggagactacgggttcgatccgtttgggctagggaagcccgcggagtacctgcagttcgagctggactcgctggaccagaaccttgcgaagaacgtggctggggacatcattggaaccaggaccgagctcgcggacgtgaagtccacgccgtttcagccctacagcgaggtgtttgggctccagangttccgtgagtgcgaactcatccatggaaagtgggccatgctcgccatctcgnagctctcactgttgagtggctcatggtnttacatgg

SEQ ID NO: 5279 - DNA, 290 bp, Glycine max
  unsure (1)..(290): unsure at all n locations; Clone ID: 700560682H1
tttcttgcacgctcgccattggtgatcacttccgatagctcttagnaacatccaatccaatggcagagaacaacaaccaccaccatttcggaaccgccatcaganggctcgcctctgtgaccaaccacctcacttcttctcacaacgcacccggcgaactcgccctgtgccgcacttccggtangagcgnnantttccaccgcgtcnagggccatgtngccctcccacnangtcgtntggaggatcatcgcntccgnccacgacaactccggcaatgncttnaccgacat

SEQ ID NO: 5280 - DNA, 290 bp, Glycine max
  Clone ID: 700560683H1
cccatggcagctcctctgcaggttgtattatacggaaatcagcctcacccagaagccaagtttttgtttttgaggagtactggtcgttgcactaattttcaggttcactcctctcgcagagcaccccctggtgttgacaccagaatccattgggaaaacgaagatgaaggttggatcggaggtaccaataccaaacaccaacaaacccacaaacccaataacatgttacaggctgatgactttccagatctcctctctgcttctttaggttctcattacgaattcttagg

SEQ ID NO: 5281 - DNA, 289 bp, Glycine max
  Clone ID: 700560684H1
ctttctctctcccttagtcaaagggactcgttgttcttctcccaggttatttagaaaagcaaaatggtgaagatttgctgcattggtgctggatatgtggggggtcctactatggcagtcattgcacttaagtgcccatccattgaagttgctgttgttgatatctctaaatcccgcattgcagcctggaacagtgaccagcttcctatctatgaacctggccttgatggtgttgtgaagcaatgccgtggcaagaacctcttcttcagcactgatgttgaaaagcatg

SEQ ID NO: 5282 - DNA, 287 bp, Glycine max
  unsure (1)..(287): unsure at all n locations; Clone ID: 700560685H1
gacgcaccaaaagacaaactcaggcctatacctattggggtctctgctgacctgcttgttggtcagaangnttatgctattgggaacccgtttggacttgaccacacactcacaactggtgtcatcagtgggcttcggcgagaaattagttctgctgcaactggtcgtccaattcaagatgttatacagacagatgcagcaattaatcctggtaacatgggaggtcctcnctaaganagtctggaaacctcattggggtaatacagccatatattccccatcngggg

SEQ ID NO: 5283 - DNA, 286 bp, Glycine max
  unsure (1)..(286): unsure at all n locations; Clone ID: 700560686H1
aaaaggattcagaaatctattttgggaaactaaagtttgaagagtatcctcaggccatgcgagtagttcatatgttcaatcagcgttttgggcgcataggtatatgccagagccagaggcagtttcaaagtcccttgcacttgcgatatggctgttctgttcaagttacacttgctctaatgttgaccatttttctcattgttcccttgtacttattcaacttgagttaaacggctgcttcacgnaaaagggnttaacttgtctnggngtatcganagggcccngt

SEQ ID NO: 5284 - DNA, 289 bp, Glycine max
  unsure (1)..(289): unsure at all n locations; Clone ID: 700560687H1
actgaacactgattactcactccttcatggccacttcgctgctatctttctccatttcgcccacaacctcagccttcagattcaaagcctccgccatggctaccaccatcgccgcccctgctaccaaggtggctcccgccgtcattgtcggcggcggaagagtgggcagggccttgcaggacatgggcaccggccaaganctcctcgtncgncgaggagagtccgtaccactcaatttcgagggccccatttttgngtgcacgaggaacgatgatcttgaatctgtgtt

SEQ ID NO: 5285 - DNA, 287 bp, Glycine max
  unsure (1)..(287): unsure at all n locations; Clone ID: 700560689H1
ctcttcttcncttgcggccagggttttagcgcagnttcttctangattnnggaagatgggtaaggcaaaggntcacatcagtattgtggtcatngccatgtcgactctgggaatccactaaccactggtcacctgatttacaagcttggaggcattgacaagcgtgttattgagaggtttgagaaggaagctgctgagatgancaagangtctntcaagtatgcctnggtgctggacaaacttaaggctgancgtgaaaganggatcaccattgatattgcttgtgg

SEQ ID NO: 5286 - DNA, 296 bp, Glycine max
  unsure (1)..(296): unsure at all n locations; Clone ID: 700560690H1
gcagcgtcaactacaaagcngcagctacttttcatgcaancccacnaaagtttgagcaggagcnacacctntgcagccggaagtctactccagtccattttccnaggcttttgggctggaanctgtnngangtanaaagggtcacatgctccccttcaggctgatcttaangacttgggctcacaaagtggtgttgatgttaccaaaattgcaggattcgnccttgncacttctgccntcgttgtctctgggggcagtgctgnaagtgttccnaagaggctaacttcgacgaaatc

SEQ ID NO: 5287 - DNA, 286 bp, Glycine max
  unsure (1)..(286): unsure at all n locations; Clone ID: 700560692H1
atgttcctggggattaacataaataaaatacaagctntagatcaactgggtcttgaccgcaaaaggttagggcgatatgcagttgagtcttacttggagcngattttatcacatggattcttccatgctgaccctcatcctggaaatattgcagttgatgatgtcaatggtggnagantgatctttatgantttggaatgatgggaagtatcagtccaantatccgagaaggttacttgaagcttttatggaatttatgagaagnatccagataaggtcctcantc

SEQ ID NO: 5288 - DNA, 287 bp, Glycine max
  unsure (1)..(287): unsure at all n locations; Clone ID: 700560693H1
cttgacatccccttcaacttctattctcttttgaaacncttagnaaagngnaaaaaaatgtctgcgtcctttgcttttcctagttttttcttctcagttgancggtggatcaatanaccnnaccatctcccatctatggaaacctcgnaaccattctcagcatagatgnaggtngtataaggggtatcattccagctgtagttcttgaccacttcgaaaaggctcttcaggcatgggataaaagtgcatcactagcaagttattttgatgtcatagcagggactagc

SEQ ID NO: 5289 - DNA, 296 bp, Glycine max
  Clone ID: 700560694H1
gttgcttggcgggggataagattaaaagattcaacaatgggcctctgcttctgctactctttctcaagtcatctcctgttcttgacaagtgcgagtgggtcaaaggccagacccttcgccaacctctcgtgagatgtaacccttcctcagcatcagctctcaccatcaaagctgcttcctatgctgacgagctcgtcaaaaccgccaaaacagtggcctcaccggggcgtggtattttggcgatggatgagtcaaatgcaacctgcgggaagcgtttgggcatctattggggtaga

SEQ ID NO: 5290 - DNA, 298 bp, Glycine max
  unsure (1)..(298): unsure at all n locations; Clone ID: 700560695H1
aagctatagatttaattgatgaagcaggttctcgagtccgggctttcaacatgcacagtttacctgaagaagcaagagagcttgacaaggaggttagaccagattgtaaaggagaaagaagaatctgttcgcaatcaagactttgagaaggccggagagctaagagataaaganatggatcttaaggcgcagatatntgcccttatagaaaaaggcaaggagatgagtaaggcagaaagtgaggcaggagatgaaggtcccatggtcactgaagttgacatacaacatattgtctcct

SEQ ID NO: 5291 - DNA, 279 bp, Glycine max
  unsure (1)..(279): unsure at all n locations; Clone ID: 700560696H1
gnngaggatnggttntgttgaagatgtngaatgatctaggcaaggtcagaaatgttaataaagtttcagacactactttcantgtacttgccagactgggtaagcaaatcgctttaaaatttngaagcnagatcagaaaactggtgacttgntngaatacanaatgcagggcagcacantgttagggcatattgtcttccttgtactagttctgncaggnccacttatnccagatancatncgctgntatagcagtggangccggacattgtattaccg

SEQ ID NO: 5292 - DNA, 331 bp, Glycine max
  unsure (1)..(331): unsure at all n locations; Clone ID: 700560701H1
gaaactgaagcctggggtatagaaccttatgatgtagaggatgctgatggtaattgcaaagcacttatcctcaaaggcattgtgcgtatggctgatatcaagtttcctcttccatacaggccaaaaatctctctctctcgtaattgtttcggatgcccttgatttcttatctccccagntaccttaacaaaactcntccagatttggcaagggtatcagctgatggaatagtggatatttactggttttccagataatcaaaaggctaaggttgcagatgtttctaaatgggaagagcggctaagatgaggattcatcctggtgggtcngt

SEQ ID NO: 5293 - DNA, 328 bp, Glycine max
  unsure (1)..(328): unsure at all n locations; Clone ID: 700560702H1
gncatggccacccacgcggctcttgcttctacaaggatcccttcaaacacaaggttcccatccaaggcctctcactctttcccaacccaatgcgccttaaagagacttgaggtgacagaattctctgggcttagatccacttcatgtgtcacatatgctaacagtgctagtncatcttccttttttgatcttgtagcttcccaactcactcccaagaccaatggatcaactcctgtgaggggagagacagtggccaagttgaaggtggcaatcaatggtttcggacgcattggtagaaattccttcgctgctggcaggccgaaaagat

SEQ ID NO: 5294 - DNA, 326 bp, Glycine max
  unsure (1)..(326): unsure at all n locations; Clone ID: 700560704H1
acaaaacccgcgttcnactcacacaccattanccgaacancatcaccgtcattcgccactctctgacacagacatgaccgaagaaggggttgttgtctcgttgcaggaatggcagggttggggcaccacctccccactccccaccatggtttcccaaatcgttgaggatttgaaggttctggaagaagatttggatgcccacatgaattttggaggcaatggtggaaaattacaggggaattttagagtacaagaagataagaagcaccgtgccacgtatcaggcttgggtgattcagaaaagaagctccagttttattcggctag

SEQ ID NO: 5295 - DNA, 323 bp, Glycine max
  unsure (1)..(323): unsure at all n locations; Clone ID: 700560706H1
tttnctnacagttcctataanngnnnnnctntattagnttaccaagctgctgcaactttgcttctcaacatggngtancgtctcctaacccatattnactttactcantattgcantggtggcnanccatgctgctntaccccctgaagtttactggaagtcggtgcttcctactacgcnaatgccaaaagccatcactgatatcctttactctgattnggtggaagagannagcagctcagtgcatnttgnaggtggaggcgtgaacgtgcatacaggaaaaggangtggcagtggcaccactgtcaacgttggtggnanag

SEQ ID NO: 5296 - DNA, 317 bp, Glycine max
  unsure (1)..(317): unsure at all n locations; Clone ID: 700560708H1
ctgcgatcngtgttgtggcaattntncttggttttcngtatgtgtatggcggatccatctttggttctcagaatagtggttcanctgctcttgaatatggcagatcattgaaaagacttggctcgtcatatttgggtgnagaggatgacactgatggcaagcaagatgaatcttcatcaagtttcagacagggagatggggaggataatattgttcctaagagtttccctgtntgtgatgatcgtcattcagagttgattccctgcttagatagacaccttatctatcaaatgaggatgaagctggacctgtctgtg

SEQ ID NO: 5297 - DNA, 317 bp, Glycine max
  unsure (1)..(317): unsure at all n locations; Clone ID: 700560710H1
tgggtttgcagcagaagcagcgaagggatatggcgattctccttctcttgcagttccttcaacncccanttcttcgggtaaagctgtntcaatgccaaccctgtcaantccatagatgcacagaactatatcntcctcatcaaacatattancactcgaactacatcanttaaagtatcaatggcagaccaaaatgagccgagtgaggttaatatgcagattgggatcatgagggagaaacttaaagaaacactgccagtctcagttcaagaattccttggaaaaaagctgagcatatactcctagacagactactt

SEQ ID NO: 5298 - DNA, 315 bp, Glycine max
  unsure (1)..(315): unsure at all n locations; Clone ID: 700560711H1
tctccgtttactttctccctcgtctctctcacntgacancgattacacnaccanattatnagncattngcggcgacgtcgtgcgttttagatggatttagatgcattacctatctcggatttttgagcccaggaaacaaaccaagaccatggatcgcaagaacccgcggaggaagcccaagctcgancgccgtaacgctcttaaatactcctcctccgaatacgacgtcntatcctccccctccgacgacacgctctacacgcgctccatggngttctacgaccgcncgagttccgaatcgagggcgtcgngggc

SEQ ID NO: 5299 - DNA, 133 bp, Glycine max
  unsure (1)..(133): unsure at all n locations; Clone ID: 700560712H1
ctgacttggctnganccagttcagcnaaaatngatcatggttccctgggtactgaagtatctaanaatttaagtgaactnaggcgaattgagttcatcaagaggtgaaganacnacacnacatgcgacgntgg

SEQ ID NO: 5300 - DNA, 323 bp, Glycine max
  unsure (1)..(323): unsure at all n locations; Clone ID: 700560720H1
agngagagagggagacacaacacaagggaaggaaaaccaagtggaatcaatagccatgaagatcgttccggaaagacctcgtacccaatggacctggcagcgttaagatggttgcagtggattcggatgatctctggtttgcgtataacctgatagctcccggagactctgtcatggccgttactgtcaggaaggttctaagagaagctgctagtggcggacgggaagcagaacgcgtcaagctcaaattggaaattaaagtccaagagcttgctgattatgacaaagaaggttctattttacgtgttcgcggaaagaacatt

SEQ ID NO: 5301 - DNA, 322 bp, Glycine max
  unsure (1)..(322): unsure at all n locations; Clone ID: 700560721H1
accacnaacactnaattnctcatctcatcatttctaattctacctcttntctcttgcactaacaatccaagatgaataccaacaacgacaccgaaaaaaaccaatcatttccagaagcacaaggnnnnnnnnnnnnnnnnnnnnnnnnnnncaatgttgggactgagaattggggaactcacataatgggcacccctgctgttccaagcagccacccagataacaaaaaagcagctttacaaagtggacaacctcaaccagttcaatactaccatgaccaacatcaacatccctacgtgcaacatagcccagttgacaaacc

SEQ ID NO: 5302 - DNA, 314 bp, Glycine max
  unsure (1)..(314): unsure at all n locations; Clone ID: 700560724H1
caaagagaatggctcaagcaatggcatcaatgactagcttacgtggttcctactcaggctgtgttggaaggtagccttngctccacacgcttgantgtggggagtggaagcagggtggcctcagtcacacgtgcagggttcacagttagagcacagcaacaacaagtgaatggtggtgaggtacaaagtagccgtagggcagtgcttcacttgttgctgctggtttgaccactggctcttttgttcaagctgtgcttgctgatgccaaacctatcanagttggaccaactcncccaacttctggcgncgnactg

SEQ ID NO: 5303 - DNA, 315 bp, Glycine max
  unsure (1)..(315): unsure at all n locations; Clone ID: 700560725H1
gcttttgactgggncttcacnantagtcatgtanatcangtacttcatcgngatatcnnaggctcaaatcntcttatagacaatgaaggnaatcttaagcttgcagatcttggactgtcacgatcattttctaatgaccanaatgcnaatcntactaatcgtgtcattacgttatggtacagaccacctgagttgntgntaggnacaacaaagtatgggccagctgtggatatgtngtctgttgggtgcatttttgctgagcttcttcaagggaagcctatattgcctggaaaagatganccngaacaattaant

SEQ ID NO: 5304 - DNA, 310 bp, Glycine max
  Clone ID: 700560726H1
atgatgcctggttgaatggggaattcattactactgttcaacaacgtggcgctgcaattatcaaagctagaaagctttcaagtgcactatcagctgctagtgctgcttgtgaccatattagagactgggttcttggaactcctcagggcacttgggtatcaatgggagtatattctgatggttcctacaatgttccagctggacttatatattcattccccgtcacttgtgccaatggggaatgggcaatagttcaaggactttccattgatgagttctcaaggaagaagttggattgactgcagaagag

SEQ ID NO: 5305 - DNA, 304 bp, Glycine max
  unsure (1)..(304): unsure at all n locations; Clone ID: 700560727H1
cattattngcacagtatgagaaagaggaaagaanacttttccaagagattgactatgttattacggacaccgtcagaggatcagttgttgatttcttacagtgtggcttcctgcaccaactttgtcattccttcatatgctgatgagatgaaagcacccgacaacattggttctctaatgggacttcttggctccatcccggacaatgctttcaaaagatccggcaggataaactggaatctcaatcataggatgctcagttgtatttggtggtttaanacttgctagtgtgggatttatttcc

SEQ ID NO: 5306 - DNA, 310 bp, Glycine max
  unsure (1)..(310): unsure at all n locations; Clone ID: 700560728H1
cctacacnccaacaagtagtgtggacgaagtagggttcttcgatcttgccataaaggtttactttcaaaggcgtgcaccccaagttcccaaagggaggactcatgtctcagcatttggactccctctccattgggtctgtgttggacgtgaaaggcccattgggccacatagagtacaccggaagaggcaacttcttggttcatggaaagcaaagattcgcaaagaggctagccatgttggctggtggaatgggatcacacccatttaccaagtggcacaagcgatctgaaggacccagaggaccccaca

SEQ ID NO: 5307 - DNA, 312 bp, Glycine max
  unsure (1)..(312): unsure at all n locations; Clone ID: 700560729H1
acaacctcatcaatttgtgtggcaaagaatttagatagtctagctctcaaatccgcntcttctcttccatccaatcctctcagactgatcttagacgcaaacacatcctaatcacaaaagcggtgaccatggcaaacatgattatggcttccacaaaacctctggttncagtctgcaccagttcccgttcccccacaccaaaactccccattctccaaatttcactccccaaagccccaaccttgaaactgaaactcccaatttcaaagccccagatgctgtccctcctgggagggatagcaccatggtctt

SEQ ID NO: 5308 - DNA, 296 bp, Glycine max
  unsure (1)..(296): unsure at all n locations; Clone ID: 700560731H1
ttgaaacttgcacgactcaactacaatcgctcttatgancacatctcatttgnacctctataaacaaattttcnaaccttaacaccttacgaaaatcaactaaaganaancattgntggcgctccctcactccatctctgccttagcnaccacactcacactctccnccccaataaccaaaccccataaagtnaacccctttcccttttcctcgaaccgaaattcacaattgttaacgaaacaaacgcganccagaagcagaagnnacctctncctaacccctgcacgcgttgggg

SEQ ID NO: 5309 - DNA, 109 bp, Glycine max
  unsure (1)..(109): unsure at all n locations; Clone ID: 700560732H1
catcacttactggnagccttgttgtgagtnagaganaaggcttcctgcaccgagcacnccaacttgatacctctgnttcnttctttncttagaattccacagaatatgg

SEQ ID NO: 5310 - DNA, 332 bp, Glycine max
  unsure (1)..(332): unsure at all n locations; Clone ID: 700560733H1
ggtaaangnagcnaanncaagagnangagnaagagcgaaancggcagagnaggatgggaaggtgtnngagggttctcagcaagccacagttggtgctcgcggacaagctattccttctccgggcantccgntgtgcnagacgttgacaaggttcgctacaaagaggntgtcttcaatcatgtnnaggaaaacgttntggtccctntgtnatgaaaccctagtcgntgattccgtggtngnacttggatcgtgcccntttngactctatgcgcgctaaaattgncgacgagctcnccangctcgacgaaagattggtgatgncgaggtaaant

SEQ ID NO: 5311 - DNA, 166 bp, Glycine max
  unsure (1)..(166): unsure at all n locations; Clone ID: 700560734H1
ggaagangttcattcatgtgagcactgatgaggtttatggtgagacagatgaggatgctgtggttggacaaccatgaggctnctcaatngtnacctaccaatccatattctggcnacaaagcnggtgctggnaatgcttgtcatggacgtatggtagagcgtatgg

SEQ ID NO: 5312 - DNA, 320 bp, Glycine max
  unsure (1)..(320): unsure at all n locations; Clone ID: 700560736H1
cacgcgccgtcctcatggatctagannccnncaccatggaactccgtcagatccggcccctacggccagatcttccgccccgnacaacttcgtcttcggccagtccggcgccggaaacaactgggccaaaggtcactacaccgaaggcgctgagctcattgactccgttctcgacgncgttcgcaaagaagccgagaattgcgactgcttgcaagggtttcaagtgtgccatnctcttggtggaggaacgggttctggcatggggacgcttctgatctncaagatcgggangagtatccggatcggntgangttgacttt

SEQ ID NO: 5313 - DNA, 316 bp, Glycine max
  unsure (1)..(316): unsure at all n locations; Clone ID: 700560737H1
ctntggggtttctctcttcaaactagggttttacagnatataagcnctctctatctttggttttcgtcattcaaatccaatccaatatcaaatatgagtcgtcatcccgaggttaagtgggctcagagacttgncaaggtctatatcacggtgcaattggctgattcaaaaaatgccaaggtggatcttacaccagatggtatttttaccttctctggtagtgctggtgctgaagaccatcagtatgagctaaaactggagctctttgacaaggttaatgtagaggagagcaaaattnatgtaggagtgcgaacat

SEQ ID NO: 5314 - DNA, 313 bp, Glycine max
  unsure (1)..(313): unsure at all n locations; Clone ID: 700560738H1
ccatcacanacaatcatgcccnagcacaccaagcatattactatgtggctatgaggttcaaggagctttatnattccctaaccaaccagaagttgtttgtggggcaaactcgaggctgggatcgctcgtcagtggatgaggcattcaaatacatnagggagatcatcaaatgggacgatgagaaggatgatgatgtatatgaaatcaacccagaagagtcttttacagtacagaaatgagttcttctccattcatcaggcaagaatgaattcccaacctttgataanccatctttgagatanatagtctttat

SEQ ID NO: 5315 - DNA, 309 bp, Glycine max
  unsure (1)..(309): unsure at all n locations; Clone ID: 700560740H1
ctgggcaatcaanaggctatggctttgttcaatttgataatgaggaatctgcccaaaaagctatagagaagctgaatggtatgctgttgaatgataaacaagtgtaccgtnggaaccttccttcgcaagcnagagagcgaaagtgctgctgacaaggcaaaattcaacaatgtttttgtgaagaatctatcagaatcaaccaccgatgatgagttgaagaacactttggtgaattggaactattactagtgctgtagtaatgagggntggggntgggaaatccaagtgttttggattgtgnattttgag

SEQ ID NO: 5316 - DNA, 308 bp, Glycine max
  unsure (1)..(308): unsure at all n locations; Clone ID: 700560742H1
gggtgagggccttccatgggcttccgcttgtgcttcctctgcaattacagctgttgccatctcngacgccgagttccgggcagaagaatggatcaggaggttgttttcttagtggaaggaaattgagggtgaaaaaggagagagcagcaattggaggacgatcgatgggcactacagtgtgcgcagttgctgagcctgacagacctctatggttcccaggcagcacccctcctccatggcttgatggcatctacctggagattcggctttgaccctcttggtcttggatctgacccggagatctgaga

SEQ ID NO: 5317 - DNA, 312 bp, Glycine max
  unsure (1)..(312): unsure at all n locations; Clone ID: 700560743H1
gggacattcttnttattgaccaatgctgcgtttgngaggnttcgaaccatgnggatctctcccccgtcctttttcccntcacncttccccaaccactaggccaactttatatanncnagtagtgagaacatgcgtctactatagttgccaggnnnnnnnnnnnnnnnnnnngacgtctgcccttcttgctattaaaaccatgcntcccattgtcggatacttggttgcatgattgctccagctcgccaagatctatagcaaaaaaggattccatgtcgtagtccgcacttagtgtgcttggtccgatctatt

SEQ ID NO: 5318 - DNA, 308 bp, Glycine max
  unsure (1)..(308): unsure at all n locations; Clone ID: 700560744H1
gggctgagcgtgcaaagagggctctcagcagccagcaccaggtccgcgtggaaattgaatcactttttgatggtgttgatttttctgagccactcacccgagctcgttttgaggagttgaacaanngatttgttccggaagaccatggggccagtgaagaaggctatggaagatgcaggattacagaagagtcagattgatgagattgttcttgttggtggaagcacaaggattccaaaggtacaacagcttttgaaggactactttgatggaaaggagccaaacaagggtgtcaaccctgatgaagc

SEQ ID NO: 5319 - DNA, 303 bp, Glycine max
  unsure (1)..(303): unsure at all n locations; Clone ID: 700560745H1
tgnctcccaaganaagaaaggctttcttacanaccctctcnttctctgctctctgtctntgagctgcctatctctcttcaatggaggtagtggagcttgcaagatagacccagaattcacaacggcgcgattgtatttnttcgtgctgttcagaataattgcagagatgaagaaagaaaacagtgttatgctgaaagctggggagctccctggtcgattgactcgtgctcgagctgctgctgctctcgtgcatatggacagctaanccctttganagagagagcacagcaaaatcagantcag

SEQ ID NO: 5320 - DNA, 304 bp, Glycine max
  unsure (1)..(304): unsure at all n locations; Clone ID: 700560746H1
tgccgttacatggtganacactgtataccttgtcatgtcanactatttgtaattatcatgtnctgtctcacggtctgctcatgaattcaacaatctttccagatcaaggactgccggacacgttacaacggtgatgctgaccatcatcagcgacgtaaaaagtttacatttcctgctcgccttatatgtggagattgttatgaggttcgcttggacaaagttcttgcagatgatgctccttttgatattgtagctgccagtttgcattgcattactcatggtctacggaggccgtgcccggcaa

SEQ ID NO: 5321 - DNA, 310 bp, Glycine max
  unsure (1)..(310): unsure at all n locations; Clone ID: 700560747H1
gtatagagtganagaatgggtgagaaaagcaagattttgatcataggaggcaccggctacatcgggcaaacatatagtggaagcaagcgcaaaggctggaaatcccacttttgctttggtgagggaatccacactctctgacccctccaaggcacaactcatccacaattttgaggctttgggcgttaatttggtccgcggggatctgtacgatcatgagaagttggtgaaagctatcaagcaagtagatgtcgtcatatccacgctgggtcacctgcagcttgccgatcagctcaagatcatcgctgcc

SEQ ID NO: 5322 - DNA, 311 bp, Glycine max
  unsure (1)..(311): unsure at all n locations; Clone ID: 700560748H1
ctncactgccgaaggtggctgaatctttcaaatcaaaataccgtgaagcttgctgagcaacataaacaacagggtgtaagctttttggtgggagatgttgagtctagtcaaggtgctttccagtattttggactgcaagaagaacaagtacctctaattatcattcaacacaatgacgggaancagttttttaaacccaatttggaagctgatcacattccaacttggttgaaggcgtacaaggatggtaatgttgcaccattgtgaagtctgaacccattcctgaagctaacgatgaacctgttaaagtg

SEQ ID NO: 5323 - DNA, 307 bp, Glycine max
  unsure (1)..(307): unsure at all n locations; Clone ID: 700560757H1
ctactcttctgtgcctttctcttctntttntcttctctcattattcaccatctcttccaaaaatggaagttccaagattatgagcctccctctagcccaaaacacatgatcccaaaagtgaccttactagcaatcttggtcatactaatatttgccgtaacccctttatggtaccctttgttgagttactcttcacacttgaacatcaataagaatattccatcatcatcttcatcatatgatcaaaggcaagaagaaaattgccctcaacatatgtggagaagtgtgacntttcagtggggagtgg

SEQ ID NO: 5324 - DNA, 305 bp, Glycine max
  unsure (1)..(305): unsure at all n locations; Clone ID: 700560758H1
caggatnngaggtgntggcagngaagggataaagtntatggtatgggggcgtngtgaaccgannggnacgcnaggaggaanctattggnctancagaaagtctnttctttanncgggtttctttcanaacaatggtgcngantgtctntttgatgncttctcatngttacccttcctggccttgtcttgcncccacaagtactgggcttnncctgcgctatctgaagggctaccaaacattctgtccttctccagtagcnanancagacctgatcaganancatcncgttgncttgagccagtcc

SEQ ID NO: 5325 - DNA, 304 bp, Glycine max
  unsure (1)..(304): unsure at all n locations; Clone ID: 700560760H1
anttaggaatatgtccagaattgaacacactcagcattgaagcaccgtttatggtttcacttgagttgaaaggatgtggtgtactatctgaagcattcattaattgtccactcttagcatcnctcgatgcttcctttngcagccaactaacggatggctgcttgtctgcaacaactgtctcatgcccactgattgaatcattgatattaatgtcatgctcatcaattggttcagagggtcttcgatctctgtattgtctccaaatttgactgttcttgacttatcatacactttcttggtgaac

SEQ ID NO: 5326 - DNA, 301 bp, Glycine max
  unsure (1)..(301): unsure at all n locations; Clone ID: 700560762H1
tgaacaggctgtgaaggccatcaaggcagngaggaaggaagaacagttgaggagtatgattacctnccatacttctattcccgttcatttgatctgtcttggcaattctatggcgacaatgtcggcgacacagtatttcggagacaacaatcctgcgtcgtcaaagcctaagnctgggacatactggattaaagatgggaaagttgttggggtcttctggaagtggaactcctgaagagaaccaggctattgctaaagttgctaaggtccagcctccggttgcagatgtagatcacttgct

SEQ ID NO: 5327 - DNA, 309 bp, Glycine max
  unsure (1)..(309): unsure at all n locations; Clone ID: 700560771H1
ggagnaacaccgtcaagtcatgatcgcaaccttcgcttcgaccttcaaactncacacccgtcgccgcnnnnnnnnnnnnnnnnnnnttgaccataacctttnanccattcgcaatgtcagangtttcgccctatcctcacacacaacttctctcantctcaatctccctacgcctaagtaagtnaatgagaagattgntatattcnnncttgcagttatactattggngngacantggtaaagaatgatgggctctcatctcttgcngagtgggcatgttgtanatanagaccttgtttcatttgnaac

SEQ ID NO: 5328 - DNA, 307 bp, Glycine max
  unsure (1)..(307): unsure at all n locations; Clone ID: 700560773H1
tctcactntcattnctacatcccgggntctgngccgtcgatgacgatggcggttagggtgcgaaatcctgacctncngcnttctcattcttctctctctcttgnccatnancttccgccaaggtcttcttcgaggngcttttacgatganggatggggaaatcgttgggttaaatcagattggnaaanngatgagaacctgnctggggagtgganccacacctctggccaatggaatngagacnctaacgncaaaggtattcacaccagtgaggattacagattctacgctatttcagcncantacc

SEQ ID NO: 5329 - DNA, 262 bp, Glycine max
  unsure (1)..(262): unsure at all n locations; Clone ID: 700560775H1
tacgtcgtcatatgttacatgttgccaattncctcggtggcaatcagtgaacaacgcnaaatcttaaacttggtctnttgtngctcttttgtactactagttctgaacatggagctgttgtctctgngactcacccctncaccttctgcntcgacntcancgctcctgcagcacttgctcactgctccaagctatgtgagtttcaaccgcggnagaagaagaaggtgtgtgtcgacgcgcctaggcttgcggtgcggtgtgt

SEQ ID NO: 5330 - DNA, 302 bp, Glycine max
  unsure (1)..(302): unsure at all n locations; Clone ID: 700560776H1
ccaaggtcttctacctcaagatgnagggagactaccacaggtacctcgccgagttcaagaccggcgctgaccgcaaggnggccgccgagagcacgctctccgcctacaaagccgctcaggacattgctaataccgagttgcctccaactncaccctatcaggctgggtcttgctctgaacttctccgtgttttactatgagattcttaactctcctgatcgggcttgcagccttgcaaaacaggcttttgatgaggctattgctgaattggatacattgggagaggatcatacaaggatagc

SEQ ID NO: 5331 - DNA, 297 bp, Glycine max
  unsure (1)..(297): unsure at all n locations; Clone ID: 700560777H1
actgcnagtntgtcaccancatggccncngtcanaanccaagcntccgccgcgattttccggccatgtgcctcgaaatcgaggtttctgaccggntnttccggtaanctcaaccgggaagtgactatnaggccaatggggtgccctccttctgcctctttcaaggttgaagccangaagggagngtggttaccggcttggctccccaacntacctcaatggnatcttcctggtgacaatggattgaccctctgggactagctgaggacccagagaattgagntggtacgttcaagcc

SEQ ID NO: 5332 - DNA, 106 bp, Glycine max
  Clone ID: 700560781H1
gtcaaaatcaacggcaaaaaggtttctttcgacacccccttgggtgggggtgcttcagctgagcacggtggtgccttacaccactctccaaacctcgatctatgca

SEQ ID NO: 5333 - DNA, 106 bp, Glycine max
  unsure (1)..(106): unsure at all n locations; Clone ID: 700560782H1
ttggtggctagctaagcnaagctaanaccaaactcttcagcagtttntntttncttagctnctactnctgcntgtgctttctnccancaaccacagaccaccancc

SEQ ID NO: 5334 - DNA, 310 bp, Glycine max
  unsure (1)..(310): unsure at all n locations; Clone ID: 700560784H1
acttggcatcgctttctcctctctcccaagaaagaatcatcaatggcgattgaacacgaagacgattctcaaagacgagaagaaccctcgacctnctcgacgaggatgacatcgccctcctcaagacctacggtttgggaccttactccacaagcataaaaaaggccggagnnggaaatcaaagatatggccaagaaagtgaatgactatgtggtataaaggagtctgatactggtttanctgcaccaagccatgggatcttgtttctgataagcaaatggtgccggaggagcaactcttcagtggcaag

SEQ ID NO: 5335 - DNA, 302 bp, Glycine max
  unsure (1)..(302): unsure at all n locations; Clone ID: 700560787H1
ggcgantnnctttganngtcagngnntatgggaactctctgtagcatccagcggagccagaaaaggaaancatgtatgatctagttgatganatagcgggtctttggatgctttnaacattacccaggctttccttgntggcaaggatttggtgcaatcccagggtatcttacagcagctgtgcatccagaaagagtagctgctgtcatnactttaggcatccttcatgcttcctggtccctctnctgtccaaaaccaccttctncccaaaggcntctatatactaggtggcaggagnctgg

SEQ ID NO: 5336 - DNA, 291 bp, Glycine max
  unsure (1)..(291): unsure at all n locations; Clone ID: 700560789H1
gcagcgtcactacaagcagcagctactttcatgncaacccaccaagnggagcaggagcaacactttgcagcaaaagtctactcagtcnatttccaaggcttttggtttggaacctgttggagctaaaaaggtcacatgctcccttcaggctgatctaaggacttggctcacaagtgtgttgatgctaccaaaattgcaggattcgcccttgccacctctgccctcgttgtctctggggcaagtgctgaaggtgtgccaaagaggctaacctcgacgaaatccagagnanga

SEQ ID NO: 5337 - DNA, 301 bp, Glycine max
  unsure (1)..(301): unsure at all n locations; Clone ID: 700560790H1
gatgaattcccttaattttgtttcancggncgattcgtgtctgttcnatnttccgagcccagtcccanactcgtttccatctccagagccagagacnaaccttatactctcgtgatccgttcctctggccacctttctaataagctaaaagtttcagccctcaaaagcnacgaancaaagccacagcagttctcactgtgtcaaaacggatggctccccgctttcccccacgtncttgttgcttcaatgtctaatttatatttgggtatcacattggngtcatgaangtcctattgtntcc

SEQ ID NO: 5338 - DNA, 301 bp, Glycine max
  unsure (1)..(301): unsure at all n locations; Clone ID: 700560793H1
catccatctntnccttctgnntgttggttctctntaaacagatantngcaaaagaagaatantnttgaatatntngntgggttnaatccctgggntgaaagcgttncagacatcacgggctatnctaaggagtgtctcgcctctcngcantcatgtgcccaactgtacgacggaggacngnttncgtatatgccaccaanccttcgccgcacgtgggcgtggtgctntgcctactganggtggtagccttccaacttgcactctanctggtggtggtctgctgtcttctaagcttcttctt

SEQ ID NO: 5339 - DNA, 298 bp, Glycine max
  unsure (1)..(298): unsure at all n locations; Clone ID: 700560795H1
gaacgggtgaaggtcgangcactgnaaatanatgggagnattttcactgcgcccaaggctcntcgtttcgagcttcgattacactctctggcctttctactgtgagtgccggtcgaagcacgacacgccttctnctgtntccanattcaagagggngcngcatgcactcaaacaggagaggattgatgttgccattgcttccaagtcgccaactcccgacatcgcaacacgtatctngacaaatcagcatcgagncaatgtttgctgccgagggaanattttacantggaaggacaaa

SEQ ID NO: 5340 - DNA, 302 bp, Glycine max
  unsure (1)..(302): unsure at all n locations; Clone ID: 700560801H1
acccagttcgcgttctcgtcactggagccgcagggcaaattggatatgctcttgtccctatgattgctaggggagtgatgctgggtctgaccagcccgtgatcctccacatgcttgacattcnnnccagcagcagagtcncngaatggggttaaaatgaattggtggatgctgcattccctcttcttaaaggtgttgttgctacaaccgatgtggttgaggcatgcactggggtcaatattgcagtgatggttggtggattccctagaaaagaaggtatggagaggaaggatgtgatgacta

SEQ ID NO: 5341 - DNA, 300 bp, Glycine max
  unsure (1)..(300): unsure at all n locations; Clone ID: 700560802H1
gacncaggcgcanagataggtatgaagatgatagaanngncttatngcagaagaggcagagatagagatgatgaagatgatagaagggattatggcanaagaggaagagntagagatgatgaagatgatagaagggtnttacggcagaagaggaagagaaaatatgacanggatanagatagatatgagaggcgcaggagagatgaacatgaagaagagctgggcgtggaagggctnnggggatagagatggtatangaagggtttacagcacggttctggtgaacttgaattatatgcc

SEQ ID NO: 5342 - DNA, 296 bp, Glycine max
  unsure (1)..(296): unsure at all n locations; Clone ID: 700560804H1
caagagcctgcgcaactccaagaatgcggtaaagttccacgactacgccttgcacntcaagaagcacgccgagaaggggaagcttccgaactacgtggtggtggagcagaggtacttcgatgtggaggtttttccggcgaacgatgaccacccctgcatgacgtggcggccgggcagatgttcgtgaaggaggtgtacgaggttttgaggaagagttcgcagtgggaggagatggcggtgctgattacttacgatgagcatggtgggttttatgatcatgtggcgacgccggtaga

SEQ ID NO: 5343 - DNA, 297 bp, Glycine max
  Clone ID: 700560805H1
tacaaaggttgctgtaggagataagatattgaagtagtgctaagtgcctaacacctgcagtgaacaatggcctctgcatcagcatctcttctcaagtcttcacttgttcttgacaagtctgagtgggtgaagggacaaacacttcgccaacctttgctgcatcagttgtgagatgcaaccccaccaccccatcaggcctcaccatcagagctggttcctatgctgatgagctcgttaagaccgcgaaaacagtggcttcaccagggaggggtattttggccatggatgagtccaatg

SEQ ID NO: 5344 - DNA, 297 bp, Glycine max
  unsure (1)..(297): unsure at all n locations; Clone ID: 700560806H1
tgtntttctctttctttatggnaaaagatgncattaggtgcagcatttntcctatccttgcaanncntacnagcaggtattggcanacagaaacaccctttctagcattgcgatttgatctctccaccttggtgaaagccntgtgaaacataaggctttacagaaggtggaattttgactagaagggatgtttggctgttgagtttatggagggtcaagctctttgttgaatagtgtttgtgttgccttatctgcaattttaattgaaccaatcctaccctttttatgaacatatgg

SEQ ID NO: 5345 - DNA, 298 bp, Glycine max
  unsure (1)..(298): unsure at all n locations; Clone ID: 700560807H1
tcagaattgaaaagtttcataaaatttntgttgacatttaatatgaacatttattngcgtgaattagcatggtgaagctctaattttgattgaaaaataacactaaaaacacctgatgaactgtatctaagctttgtccataacagaattggaaggccgatgtaaattcctggtacatacgactancntcattgattaagattgcaagtttgtgttggcttcaagggtagcatttgaattgagatattaataataggatcctgttatcctgtgtacttaaggtaatggttaaggaact

SEQ ID NO: 5346 - DNA, 280 bp, Glycine max
  unsure (1)..(280): unsure at all n locations; Clone ID: 700560808H1
atttcccttcttagctttcattgccaanccctagtgtggcctagctgtttgntcantntgagaaaggcttccacttctgcaatgctcancttggcgcttcggtgtttcgctattgctggttgccagcttcatttgtgctcttctgttatggcaacatctgaagtttcagggaattcagtggataccgatgggaagcttgtaaatgaagagccagcaaaaacaagccttcaaggatatgatgaagaagaaaaatttaaagggcttttccaaaatctattcc

SEQ ID NO: 5347 - DNA, 300 bp, Glycine max
  unsure (1)..(300): unsure at all n locations; Clone ID: 700560809H1
ttctgataaagtttacagtgatcagggagtgcctgcntcttttcgagttccttctggggcagttttaccatttggatccatggaattggagctagagaagagcaattcgactgaagcattcaggtctatcctggaaaagatagaaacagccaagctgagggtggtgaacttgatgttctatgccatcaactccaggaattaatttcttccctgaagccatcaaaagacataattcaaagcattgggagaatattcccaagcaatgcacgtttaattgttcgatccagtgccaatgttgag

SEQ ID NO: 5348 - DNA, 302 bp, Glycine max
  unsure (1)..(302): unsure at all n locations; Clone ID: 700560810H1
gaaggttattgcctcaagggtccccaacagcaaggtttncggtggaagcttcaagattgttgctgtagaagagaagaaanagattgaagagacccagcagaccgacaaggacagatggaagggtcttgcctatgatatctcagacgaccaacaagaatcacaagaggaaagggtttggttgactcccttttccaagctccacaggatgctggaacnncactatgcagtcatgagctcctacgagtncctcagcactggacttcgccagtncttggacaacaaaatggatggattctacattg

SEQ ID NO: 5349 - DNA, 298 bp, Glycine max
  Clone ID: 700560811H1
ctctcccttagtcaaagggattcatcgttcttcttcccaggttatttagaaaagcaaaatggtgaagatttgctgcattggtgctggatatgtggggggtcctactatggcagtcattgcacttaagtgcccatccattgaagtcgctgttgttgtatctctaaatcccgcattgcagcctggaacagcgaccagcttcctatctatgaacctggccttgatggtgttgtgaagcaatgccgtggcaagaacctcttcttcagcactgatgttgaaaagcatgtctttgaggctgaca

SEQ ID NO: 5350 - DNA, 301 bp, Glycine max
  unsure (1)..(301): unsure at all n locations; Clone ID: 700560812H1
aaatatcttgaaaacccaaccactctctcctcatngcttctaacctctnattnctncaacataacatnnctacntatntcatntcgacaccgacacnccaaacatacnactcncaacgacctncaacntctccnatcttaacctccccaaaccctacttattcctccctccatanccaancttcccncacttgaattntcntccattagcatnaccccaaccctaatcggtcaaatcccctcatccatcgctaaactcacccaactccntantaatatatcacccacacaacatanatnta

SEQ ID NO: 5351 - DNA, 287 bp, Glycine max
  unsure (1)..(287): unsure at all n locations; Clone ID: 700560813H1
cacactgaactctcttcactgaaacgacacncncannaaaaagcttgagtttaggatgacccaagtgaggaacaagcaagtggttctaagagattntgtcaccggattccctaaagaatccgacacgaacattgttgaaggcacctaatattgaaggttccagaaggttccaatgatgtccttctaaaaaatctctacttgtcatgtgatccatacatgcgactcctnatggccaaggaccgttctttcggagatggctccttcacccttgcctctccattgaaagg

SEQ ID NO: 5352 - DNA, 288 bp, Glycine max
  unsure (1)..(288): unsure at all n locations; Clone ID: 700560814H1
cattgctctattccaaggccatacacctgctattcctttggatgataccaaaggagtggctgagccacctgatatccagaacagaganagncacaataaggtagaaagtattaattnctgttttggatcaaatccttcaactgaaacgacttcaaaacatcatggacatgaaaggtaatattgatgatcccatgaattatttctcatcgttgaacttcgaaggctgtaactttggggcgtttaatgaattctcccaacctccatntgaagattcagaagcttctttct

SEQ ID NO: 5353 - DNA, 287 bp, Glycine max
  unsure (1)..(287): unsure at all n locations; Clone ID: 700560815H1
gtnaccatggcatccaccactctatcccctacnacaccttctnngctatgctcangaaagngtgggattttcagtccctcacaggcactntcttgtgangccagtgaagaggcagatgatggggaagagcaagggaatgagaattnatgccaagccaccagcattcctggtgatagagtccctgacatgggcaaaagacagctcatgantctgcttcttcttggtgncatttcanncccctctgctggnatgcttattccctacacctacttttttgtccctccagt

SEQ ID NO: 5354 - DNA, 300 bp, Glycine max
  unsure (1)..(300): unsure at all n locations; Clone ID: 700560817H1
aacacgtcacctctgccanccattttccttngtttctntattcttntttttgggaacgtgagcgccangatcggacacttgtctcccattnccttcattatcacagtttccatctaaccatttctcgcagaattccagttccagtttcaggntcacnganttgatggctaaagttggtaagttgcgganaaggctcgaggtcacagggcaagcccacatcttttgtcttgtggaagaaaaaatctgaaagatgttaatgttaggaagagctcttctaaagcattggngaagaaagatggg

SEQ ID NO: 5355 - DNA, 300 bp, Glycine max
  unsure (1)..(300): unsure at all n locations; Clone ID: 700560818H1
atcctgctcataacttcttcatcacatctgcacacggnctgtgattcaacaagctcgcacgatggaccgtcaccttctctccctcgttccaaattttccccagccagcatgtccattttcagcgtgctaaccatgatgtcaggagttgttctatatgacgcctctttgttccctttgcgcgcagattcacagggaacccttctggaatcacatgtttgcaaagaatgggaataggcttcataatcaatatcatagccactgtgattgctggcctaatggaaatgaaaaggaaatctgttg

SEQ ID NO: 5356 - DNA, 231 bp, Glycine max
  Clone ID: 700560819H1
tcctctcacagtcacacctttctcctttcgtgaagacaccttgccaatggcagcatcactatcacactgctaaagtcttggtctctgccctggcaatacccaaattgaccaaaatcccgactctggacttcttcaacgccctactcctccagacccactcgatgacgctcgtcaggctcggagatcgtcagattggaaggctgcaaagacatatcaagatagtaaagtcat

SEQ ID NO: 5357 - DNA, 295 bp, Glycine max
  unsure (1)..(295): unsure at all n locations; Clone ID: 700560821H1
ctgaattgagttcactgtccacaagtntcgccccanncactcaactcggctcnnnnnnnnnnnnnnnnnnnnnnnnctccatatcaaacaaagtatagataaaatntcattgcagcttcattttcatcctccaattaattagcaatggggcacaatcccttttcactncctcttcctctcttaggttcaactctcttcttgtttcctccaccccctcttcttcttcacgctccaacagcgtttctttccccgccctctccaggaacataaggaaatcggtagaagatagaaagat

SEQ ID NO: 5358 - DNA, 295 bp, Glycine max
  unsure (1)..(295): unsure at all n locations; Clone ID: 700560822H1
tttaattttctattttattctattacactcaaccagagagnngaagcagcaganaacagtgagaagaagagcttggtgttaccgttgctgttgcgtgacgtgccccttatcttgttggcaccaaaggccgaaactttgaagataacaagagagcaatggctatttgtgtttctgggtcgcacacacttttcgtgaaccgttccaatttgaagactgtggcggttctgagcagagagaagaagatgcgtgtgcaatacgatctgaagcaagggcagagtcgtatttccacgagctc

SEQ ID NO: 5359 - DNA, 296 bp, Glycine max
  unsure (1)..(296): unsure at all n locations; Clone ID: 700560823H1
ggggactttggcctagcaagactgttgccaatgcttgatcgatacgttttgagcagcaaaatttcagagcgcactncggctacatggcgccagagtttgcctgcaagacggtgaaaatcaccgagaaatgcgatgtatatgggtttggtgtcttgtcttggagatcgtcacagggaagaggccagtcgaatacatggaggatgatgtggtggtactatgcgacatggtgagaggggcttggaagaaggcagggtggaggagtgcattgatgagaggctccaagggaagttcccagc

SEQ ID NO: 5360 - DNA, 297 bp, Glycine max
  unsure (1)..(297): unsure at all n locations; Clone ID: 700560824H1
ctcaaatggctttgggtatgaaggagactggggtnctcatccagctgagatcgaacctagtggaattgaactttttgagtaccatgatgatgacgaaccctctgaagatgtcgacataagcatcaagggcaagaggaaagatgatggtggcattttttgagactaagaattgctgataaagaaggtcgcatccgaaatatttatttcccatttgacatagagctggacacggcaataagtgtggcaactgaaatggttgcagagctggacatgactgatcaggatgttaccagaata

SEQ ID NO: 5361 - DNA, 287 bp, Glycine max
  unsure (1)..(287): unsure at all n locations; Clone ID: 700560825H1
cccattgtntctcttgctttcttcatacatggattgcctaggcctctgttcacacgtcctaatgnctcgcattttaatttctcctggattatatctgcactaggtaatcacaacaactcanagaaaagaaggctggccaattcaaatcagtttaggtgtatcagatccaaagattggttgtcagatatctgaactccctaaaattcctgccaaagtaacgagtttgacagtgagcttcttcgtggtgtgcgcctccattttgatagtccagggattggaaaaggcac

SEQ ID NO: 5362 - DNA, 297 bp, Glycine max
  unsure (1)..(297): unsure at all n locations; Clone ID: 700560826H1
gccgattcaacctcaagcgattcactctcactcgacatggattcnttttctccttcacctcaggaacatatcatcagancacgtcatggttctgtatctgttgctgtatatggagaccaggataagccagctctaatcacatatccggatttgntttaaattatgtctcctgctttcaggggttattattttgtcccgaggcatattaccttctgctccacaatttctgcatttatcatattagtccacctgggcatgagttgggagctgctgcaatcgatcaagatcacccaattc

SEQ ID NO: 5363 - DNA, 295 bp, Glycine max
  unsure (1)..(295): unsure at all n locations; Clone ID: 700560827H1
cggctgagaccagcttctganccttctttgcgacgcggcggcgaacaccgcgatgtggaggagaggatccgaaaggcggcggatggagatccggtgcaccggaagatatttgtccacggattgggctgggacactaccgccggaaccctaatagcgcgttccggcagtacggagagatcgaggactgcaaggccgtcaccgacaaggtctccggcaagtccaagggctacggcttcatcctcttcaagacgcgccgcggcgccaaaacgcgctcaaggagccgcagaagaagatc

SEQ ID NO: 5364 - DNA, 290 bp, Glycine max
  unsure (1)..(290): unsure at all n locations; Clone ID: 700560828H1
cccgtgggacttacaatgaccccacttcgtgcnaagtataatgacaaaatggcagcaatgaatgcacctatagtaaaacctaaaggaagcaagaagttgaaagattgggaatctagggaatctggatgaacttgaagttacaaaactatcatgaagatatagtccttcagttatagctcacggattaataccagattagatatcaccttatcctatgtatgcttgtgttctgtcttaatacagaatgtaaagtagttcatcacggctcaagcatgttatggatctggaag

SEQ ID NO: 5365 - DNA, 294 bp, Glycine max
  unsure (1)..(294): unsure at all n locations; Clone ID: 700560829H1
gcaggattccctnatccagccatctcgaaatgtccgacccggaaaacacacccgcgcccncattcggagcaagactcctcttcgccaccgcccgncccaanaccaacccgtcgccgctgacgccaagctcggccccgccggcgtctccttagcatatggccccccactcagcgcacgcgcgacgccgtcatcactcgcctcatcgaaaccctatcctccccctcngtcctctccaaacgttacgggacaatgtcccccgacgaggcctccactgccgcccgccagatcgaggac

SEQ ID NO: 5366 - DNA, 288 bp, Glycine max
  unsure (1)..(288): unsure at all n locations; Clone ID: 700560830H1
ggcgtttctatattacttgcaatagccactctactatatacattacaaattaattgaagcacacttgtcacatttacatttagtgacagatatatagtaancatcatcatgggtttgaagaacagtggcgttggtcatagagcatgganctccttcgggcatcattgctgtgggcaagcaaaggtggcgtgttgaggcgcagggtggcgatggagctgcgtctgtaccaaagtacttgaagcgactcggccacactgctcctccaagccacattcatatttgaacgcg

SEQ ID NO: 5367 - DNA, 291 bp, Glycine max
  unsure (1)..(291): unsure at all n locations; Clone ID: 700560831H1
gtgngatacaattgaggatgcatcanantcanacancacancaatgnncacanncatcnctancaaacaagctgtaattggattatggagtggcattgcttggactngtagggatnactgtgttcattgctgtgttgtctgaatatgtgtngananaattnaggatncatcagattcntngggtntgtctgtnagctttctcagcanaatcttgctaccaatagttggnaatncagctgaacatgcaggancaatcatatttgctttcaagaacaagctggacntttcatt

SEQ ID NO: 5368 - DNA, 299 bp, Glycine max
  unsure (1)..(299): unsure at all n locations; Clone ID: 700560833H1
ggctaacggtaacggtaacagcggggtgaaggaggtgcattttcgtggagtgagaaagaggccgtgggggagatacgccgcggagatcagagatcccggcaagaagagccgcgtctggctcggnaccttcgacanggcggaggaggcagcgcgtcctacgacgccgcagcacgagagtttcgcggccctaaggccaagacaaacttccctctccctttggaaaatgttaagaactcgagccccagccagagcagcaccgtcgagtcctccagccgcgaccgcgacgtcgccgccgattc

SEQ ID NO: 5369 - DNA, 292 bp, Glycine max
  unsure (1)..(292): unsure at all n locations; Clone ID: 700560837H1
acttattcaattttnatctttcttttgctctttgtgcattataatcttctcttgtcattacaacccccccgttactcaaatcagaaactctcatttgaagctaacaaacaacaaagatcaacggatctatctaccttcagtcatggtgtttctttcaaccaacgcttctgggtttcttcttcgcttctcctcctcgcggtcctctctgtttctctctcactcccactttcctttctgacaccgttttcgattctcaaccagcgcataccggtcggaaccttcttcaggctaa

SEQ ID NO: 5370 - DNA, 294 bp, Glycine max
  unsure (1)..(294): unsure at all n locations; Clone ID: 700560838H1
caatggcatccacacaatgcttctncacnccaccatgccctcaccactccaaccanagccncatcacagcgcttagttgtgagcaccaaaccaaaccacattgtttgcaaggcacaaaagcaggttgtccaagagggtgaggacactactaacttgtctctcgcaggttggccctcactgttctcattggtgctgctgctgttggctctaaggttgcacctgctgatgctgcctatggagaagctgccaatgtgtttggaaagccaaagacaaacactgacttccttccataca

SEQ ID NO: 5371 - DNA, 291 bp, Glycine max
  unsure (1)..(291): unsure at all n locations; Clone ID: 700560839H1
agctggtggcgccggcnacagtgggggcggacggggagtttatggtgggggctgcggtggggacganggaggacgataaggagaggttggagcatttggtgaangctgggttgaatgttgtggtgttggatagttctcaagggaactcaattatcagttggagatggtgaagtatgtgnagacggtgtaccctgagcttgatgtgattggggggaatgttgtgactatgtaccaggctgagaatctgattcaggctggggttgatgggttgagggttggaatggggtctgg

SEQ ID NO: 5372 - DNA, 294 bp, Glycine max
  unsure (1)..(294): unsure at all n locations; Clone ID: 700560840H1
attttggcacgcntcangttgcttctgaggccnctttgacncgaaaaaaacctcgcaaaaattgttcttggggtattatatggcaanctcgccaataatgaanatacagacaatgntttctggctcagaaacntacttttganagggggttcaacatggcacagttaaaacctgtttgtcanttgtgtnggaagccatatatgtctgatctgacgtatatttgctgtgagacatgccgaaattggtatcacgctgaagctgttgaacttgaagnntccaaaatttctagtgtgt

SEQ ID NO: 5373 - DNA, 298 bp, Glycine max
  unsure (1)..(298): unsure at all n locations; Clone ID: 700560841H1
tgcaattgaagttgaagtcttgcccttctctcttcaactccaaacacaagacatcatncatccatggctgcctccgtctccactgtcggagctgtcaacagagctcttttgaacctgaatgggtctggacctggggtttcagctcccagttcancttctttgggagcagcttgaagaaggttattggctcaagggtccccaacacaaagatttcctctggaagcttcaagattgttgctgtagaagagaagaaagagattgaagagacccagcagaccgacaaggacagatggaaggg

SEQ ID NO: 5374 - DNA, 294 bp, Glycine max
  Clone ID: 700560843H1
gtttccctttcattttccctcactttctcgctcgccaaacgcccctctctctccttcaatggccgaccagctcaccgacgaccagatcgccgagttcaaggaggccttcagcctcttcgacaaggacggcgatggttgtattactactaaggacttgggactgtgatgcggtcactagggcaaaacccaactgaggcagaactgcaggatatgattaatgaggttgatgctgatggcaatggaaccatcgacttcccagagttcctcaacctgatggctcgcaagatgaaagac

SEQ ID NO: 5375 - DNA, 283 bp, Glycine max
  unsure (1)..(283): unsure at all n locations; Clone ID: 700560845H1
gctcttcgagcctaggcctccgttggagtacaagccgcctccggacgaaacgnanntgtccaccgttatcagggatngctcaatttgtgagcnagtttgcccagcctggcgatccagaatatgctccacctgtcccagaaacgagactcctgcacaanaaagagcnagantacacaagctaaggctagagaaaggagctgcaaaggctgctgaggagcttgagaaatatgatccacataatgacccaanctgtcgggagatccatacaagacttgttngtggc

SEQ ID NO: 5376 - DNA, 301 bp, Glycine max
  unsure (1)..(301): unsure at all n locations; Clone ID: 700560846H1
cagatccgaacgcagtaaaaaaaccatggcggaagaacaccgatgcgaaactcccgaaggtcacctactnctgcgccaacaactgcggcttcttcggtagcaccgccacgatgaacctctgctcgaaatgctacggcgcgatccgcttgaaggagcagaagnagcgtcgacgaaatctacaatcganaccgcgctctcttcttcctcgttgaaaccgtcgttctccacgtcacctccaacgttggtggatgtcctcatcgaatcgccgccgccgtctttggcggaggttgcggtcacggtg

SEQ ID NO: 5377 - DNA, 278 bp, Glycine max
  unsure (1)..(278): unsure at all n locations; Clone ID: 700560847H1
gcgaaacagaagaaagaacaagttagagtcctccacgcaaacctcatcngctcaaatccttcctcgccagcattccggctccaaggaacaccgccactctcggcgttcaagcaagttccggttcaggccggagaccatcctcgaaaccgaatcgccggcaccggcatcaaattccggtggttccaacaattttcccgttgatcaaagtacaggggattatgaaaattatgagaattaccaatatgccaccgaccagtatgctaattattatggcaatt

SEQ ID NO: 5378 - DNA, 299 bp, Glycine max
  Clone ID: 700560848H1
caactcactcacagagtaatggcatccatggcggctataggttctctgaatgttccttgttctgcttcttcgcgttcatcgaatgtgggaagaaaaagctttccacgcagcctttcattcgctgcatcacaactttgtggagacaagattcacacgattcagtttcattcgcaccaaaaatcggtcgcaatcctgtaattgttacccctaaagcagtttctgattcccaaaactcccaaacctgtcttgatcccgatgctagcagaagtgtgcttggcattatacttggaggtggtgct

SEQ ID NO: 5379 - DNA, 295 bp, Glycine max
  Clone ID: 700560849H1
gtgaagaagctcaaagcgttaaactgcttcttcttcttcaatggcggcagaatcatctcgcagtagcgctaaacgcccctttatggaagaagacgacgacgaattctccaaaaagccaccagcaaaaagggttaggtttccaaagggaaagaagtgaagccaggagatgaagtggtggtggacaaagcaaatgttgaggagggtgaagaagttgacttggtgaatgctaaaactgctaccaatgctgccaaagagcgggaaaaactcagaaggtttctaaagggaaagaaatgaa

SEQ ID NO: 5380 - DNA, 290 bp, Glycine max
  unsure (1)..(290): unsure at all n locations; Clone ID: 700560850H1
atanattggcataccctttgctgctgctctttacccatccattcttcaaatggaaaagctccatgcttctgtgctcgccctgtattccttcttgtcatactatttcaggaaggattggtaacatgtatgaagaatgaagacggatcagagaatggggatatgtgcaagttagaccaaaagcccacttgttctggtggctttacagaagtccatacagagtggagaatccctccaagccttggccaatcatctctggcttcagggaggaccaggctcttcaggagttgggt

SEQ ID NO: 5381 - DNA, 293 bp, Glycine max
  Clone ID: 700560856H1
gggaacgggagtgtttgtggatggccctggggctggcaaacacatccaagcaggtgctaagaaggttatcatcactgctccagcaaagggtgctgatattccaacttatgttgtcggagtaaatgaaggggactacactcatgagatctcaacattataagcaacgcttcctgcaccacaaactgtcttgctccctttgtgaagatcctggatgcagagtttggaattgtgaagggaaccatgacaaccacgcattcctacactggagaccagaggcttttggatgcttcaca

SEQ ID NO: 5382 - DNA, 292 bp, Glycine max
  unsure (1)..(292): unsure at all n locations; Clone ID: 700560857H1
ctgaggaccttgcaacaccggcgtctccctccttcctctcctctctctgcctttacctttgattgtaggttnttcattatttggcggcggtgagttattacgcgcaacagtattgaaaagtcatgcatatgctatatgcatatctcaaacgtgttttattttttcagaaacagggttgaatatttttgttttagcgtctgagctttgaattacagagcaaagtgaagcgtgaacatggtgatgcatctaaacgggacaccgtgcgctctcggattccacatgcctgcggagt

SEQ ID NO: 5383 - DNA, 294 bp, Glycine max
  unsure (1)..(294): unsure at all n locations; Clone ID: 700560858H1
acaaaacacgtgaccttcctcacagaacanaaccnccatttcttgcttcattcctcnttactttaacatgcaaacttagcatgtaacgtaagtntaacagtaaagtanccttccgttcccgttgtgactgatggcctcggtgacgggttttctgcctcacatgtcgntgctgtaaggcaccaccggtttgaagttggaattggagttcgggcggtgtcgtcatctgaatctgaaacagtggcagctgtgaacggatcttcttcgcggaatggttccttgctactgaaggaggaa

SEQ ID NO: 5384 - DNA, 292 bp, Glycine max
  unsure (1)..(292): unsure at all n locations; Clone ID: 700560859H1
aacctaggaagttggaagtcatggcagcaacattgatggcancaacaacaagttctggtactcttaaagcaactccttttccttggccaaggcaagggtnccaatgccaatgctcttagggatgttgtctccatgggaactgggaagtaaccatgggcaatgatttgtggtatggaccagacagagtgaaatacttgggacccttctcagctcagaccccttcatacttgaaaggagaattccctggggattatggatgggacactgctggcttatctgctgacccagaanc

SEQ ID NO: 5385 - DNA, 300 bp, Glycine max
  unsure (1)..(300): unsure at all n locations; Clone ID: 700560862H1
gaagaagtgagggcaagaactttgcagcataccagcatgagcatgaagctcttccagctcttctccctactcccattcttcctnctacttctacacaatanaagaagnanaangcccattgcaactgacacacccactggaccccttnactcancaanaaatcacnctcgtcaaaaccatagtcctaaaaaagtaccccaagaccagcnaaccgcgtcttcttccactacgtcggnctcgncgatcctgacaaggccgccgncctcaaatggctctctccggngcccggacgccgngcaa

SEQ ID NO: 5386 - DNA, 296 bp, Glycine max
  unsure (1)..(296): unsure at all n locations; Clone ID: 700560863H1
ggggaggtccttcccgggatgtnacccgttttttctccttantattgttggtgncccccaggggtttctacctgtancttccattgnngcggttacgcaattccccaactcatctattgaaacattgccttttccctcaggtgcntctttnttnccaatcctctatcggctaacttgttagatccagtacatcctcttagtacttccatggactttcctcctttttccctgatccactggtgagaatgtccttgccatctcagcagattcccactntcnnaccattaatgtgtgat

SEQ ID NO: 5387 - DNA, 290 bp, Glycine max
  unsure (1)..(290): unsure at all n locations; Clone ID: 700560864H1
gtagaggatcagtgaggttgtggcaatggtttgtgcaatctcgtcatcaccgttctcaacttctctcgtttcggcgtctcgtcgtacgcaatgcgnccgccgtctccgtgcaagcngcgtgccgttaaacccttaacggcacttccagcgcggggcggaggcagttgctgttttttctgacggcgacgacggcgttgacggcgagggaagcggcgtccgtggcgcagganattcccttgttcgggatacggaagagtctgaagaaggtggaggangaagcggaggagatt

SEQ ID NO: 5388 - DNA, 293 bp, Glycine max
  Clone ID: 700560865H1
atcctaagagcagacacaagggaaagcttgagacagagagtttgctacaagcaaggggtgttaattggacatctataaggccagtctacatctatggacccttgaactacaaccctgttgaagagtggttcttccatagattgaaagcggacgcccaattcctatccccggctcaggaatacagataacccaacttggtcatgttaaggatttggcaaaagcttttatccaggttcttggtaatgagaaggccagcaaggaagtattcaacatctcgggagataagtatgtca

SEQ ID NO: 5389 - DNA, 249 bp, Glycine max
  unsure (1)..(249): unsure at all n locations; Clone ID: 700560867H1
ttcgcaaaccctaatttcggaaagatcggcgatggctgcctccaaggatcgcgagaacttcgtctanatcgccaagctcgccgaacaggccgagcgatacgaaganatggggnatcaatgaagaacgttgcgaatctcgacgttgaactgactgtggaggagcggaatttactttctgttgggtacaagaatgtgattggtgctcggagacatcgtggaggatcctgtcttccatgagcaaaaggaaga

SEQ ID NO: 5390 - DNA, 292 bp, Glycine max
  Clone ID: 700560873H1
ctgaaacgacacacacaaaaaaaagctttagtttaggatgacccaagtgaggaacaagcaagtggttctaagagattatgtcaccggattccctaaagaatccgacatgaacattgttgaaggcaccataatattgaaggttccagaagttccaatgatgtccttctaaaaaatctctacttgtcatgtgatccatacatgcgactcctcatggccaaggaccgttctttcggagatggctccttcacccttgcctctccattgaaaggatatggtgtgtctcaagtgctgg

SEQ ID NO: 5391 - DNA, 288 bp, Glycine max
  unsure (1)..(288): unsure at all n locations; Clone ID: 700560874H1
aaggaattgaaatgnaatgagacgaaagtnagttttgtatttaactaaaagttgtcgttttaaaacgaacgggccttaatgattttaatgtaatttctgaaactgataattaaacatttgatttggttgtgcagcatgacgtggatgtggtgtgttgaagaaagtggtgttggctgagggancagcggttaccgtcaaaggtgcaagatccgttagtcttcggcaacctcttgattccctcttcccgttaaaccgaacggagaatggtttgctaacggtcttttaact

SEQ ID NO: 5392 - DNA, 261 bp, Glycine max
  unsure (1)..(261): unsure at all n locations; Clone ID: 700560875H1
angtcatntttgccatctgaaacaccacngangagtgaagaggtnangagaagaggagctaganacagttacgtggcaatgggcaaggtgaacgcaagagctttgagagaatatacgattagatgtgtacaatgatcttggagatcctgatagcagcgacgactcaagagacccgttcttggtggcaatcaacatccatacccaaggcgttgnagaacaggaaggcctcgttgcgacaaagatccttatcggagaaaagaa

SEQ ID NO: 5393 - DNA, 294 bp, Glycine max
  unsure (1)..(294): unsure at all n locations; Clone ID: 700560879H1
tcttaacatgcacaatgaggcggttcgagctcttcgttttccaccaaacacacacaaagagaaggaangtgctgaaaagagaagagagagacaacagcaagagcaagagctggctaagcatattgcagaggaggatgacgatgatttttganattgtcttatttcaccctatgaattgctatgaggataccttcgtttccaacctttgctcatcttttccttttgaagaatttccattattatttccttttcaaaaggtgaatttttcatttctaagtggaagatctctgaaag

SEQ ID NO: 5394 - DNA, 293 bp, Glycine max
  unsure (1)..(293): unsure at all n locations; Clone ID: 700560880H1
gtttgacgcactgtgtaatgctatctacgatggctctctctgcgcatatttgccgtttccccgccacgcgcgctgagcactgctttgccggagactctcacgagaatccggtgccncaagcctctctctgtccgatgctctggcgattcccctccggctctgtgggttcggagttcgatccgaaggtgtttcgtaagaaccttactcggagtaagaattataaccgcaaaggatttgggtacaaggaagagaccctccaatcatgaatcgcgagtacaccatgatatcataag

SEQ ID NO: 5395 - DNA, 293 bp, Glycine max
  unsure (1)..(293): unsure at all n locations; Clone ID: 700560881H1
caaagcaaccctatgtcgaaggtggtttgtgtcaccggagccagtggcgcccttggatcatcgggtggncctcctcctcctccagngtggttatacggtccatgccaccgtccaagagcatcaaggatgaaaatgagacgaaacatttgaggaaatggaaggagcaaagagtcgtctccattnttttgnaatggatcttcttgacatcgactccattgccgctgccataaaagggttgctccggcgtaatccacctcgncatgtcctaacatcatcggtctggtcgaagatcc

SEQ ID NO: 5396 - DNA, 136 bp, Glycine max
  unsure (1)..(136): unsure at all n locations; Clone ID: 700560884H1
atttttgtnatatttgataccccaacaaatatgtatcttctgtnttaataattttntatgccactactgtcgagggaaggatagtgtacaagagttaaacctcattacattcgtaacattatcgtaacaacaataa

SEQ ID NO: 5397 - DNA, 287 bp, Glycine max
  unsure (1)..(287): unsure at all n locations; Clone ID: 700560885H1
gttttgcactctggtgnaagttcaatacatgctnngaaatnggagagcaagtcntgttncttgggctaatgatgcaggagngaaggtttatgatantgccnatgaccagcgtattacatttattnnaaaaccacgaggnagcccagccctgagcttttgcttcctcaccnggtttngctcgatgacaccctcttgnttattggctggggaacatctgtccnaaattgcttcaattagnacaaatcaccanaaagcagccaatgggtcattcaggcaattcctttgtc

SEQ ID NO: 5398 - DNA, 289 bp, Glycine max
  unsure (1)..(289): unsure at all n locations; Clone ID: 700560889H1
gcagaagaacaagtagttgagaactaagaaggagaagcaaatggcttcctcaatgatctcttccccagctgttaccactgtcaaccgtgccggtgccggcatggttgctccattcactggcctcaagtccatggctggcttccccacaggaagaccaacaatgacattacctccattgctagcaacggtggaagagtgcaatgcatgcaggtgtggccaccagttggcaagaagaagtttgagactcnttcctacctgccagaccttgatgatgcacaattggcaaagg

SEQ ID NO: 5399 - DNA, 289 bp, Glycine max
  unsure (1)..(289): unsure at all n locations; Clone ID: 700560891H1
taaaccagcaaaatcttatcttagcaatagctactcctattcacaacaatactctnnttaggcaaaaacaccaaatgggagaggaaaaagagcagcctaagnatganaccgagaagaagcccgaggaggccgccgcagcccccaagaagacgacggacccatccctgtcgtttacacactcgacttgcattgcgagggatgcgtcaagangatcaaacgcacatgtcgccattccaaggtgtggaaaccgttaaggcagtctatcgtcgaacaaagtgactgttaccgg

SEQ ID NO: 5400 - DNA, 284 bp, Glycine max
  unsure (1)..(284): unsure at all n locations; Clone ID: 700560894H1
ctcttgtaactcagatgggttcaaggatgaaaacagcagtatttgaagagcanacaaacaaggctctgaagaaatggcacatggatgcnnnnnnnnnnnnnnnnnnnnntgtaggaacagtgacactaggaaagtcgagtcacgaatcatggatggaagccccattggtaattcttcaacagtgcactcctcctctgttcccacactacaccgtttcngaactaccggccactcaacaacgtacgnggatcaagatcatgatcatgatcatgaatatgaatccg

SEQ ID NO: 5401 - DNA, 293 bp, Glycine max
  unsure (1)..(293): unsure at all n locations; Clone ID: 700560895H1
gtctcaactcntcaagggtgctncccattcccaaagagccataccanccattttcccnnntcccctcaagcatgccaaagtttgcntctttgagaatcccctcttcntctgtggcttgctctctcacaagagactnttcctctgttgtgcattggaggaacatgacaaaatgggtaatgggtcggttctgcttcaganacccgattcgtttgggaggtttggcaagtttgganggaagtatgtncctgagactctgangcatgctctctctcagnttgaggctgcctttnatt

SEQ ID NO: 5402 - DNA, 294 bp, Glycine max
  unsure (1)..(294): unsure at all n locations; Clone ID: 700560901H1
tagaactatccatacatagccacttcncactcactcactcttgttgccttcatggccaagccagtgtccattgaggtatggaacccaagtggcaaatacagagttgtcagcaccaaaccaatgcctggaactcgttggatcaatcttctcattcaaaatgatgttcgccttgaaatatgtaccgagaagaaaacgattttgtcagttgaagacatcattgctttgattggtgataagtgcgatggagttattggacagttgactgaagactggggagaagagttgttctctgct

SEQ ID NO: 5403 - DNA, 288 bp, Glycine max
  unsure (1)..(288): unsure at all n locations; Clone ID: 700560903H1
tttatttacaacaacaatggcttctgtgcctcaaccaaaaatctcccttctaaccttattcttcttctcgtccttcaccatcattgcgcatgcaattgttcctcaaaacgaaaccttnaaatttgagaactcaggtgaacttggaccctacatcgttgagtacggtgcagattacagaataataagcatcttcaactctccattccaagttggtttctacaacaccaccccaaatgccttcactctagctttgcgtgtagggctccaacgctcggagcagctatttcg

SEQ ID NO: 5404 - DNA, 286 bp, Glycine max
  unsure (1)..(286): unsure at all n locations; Clone ID: 700560905H1
gtaacagcaatggagctgtcttccagtgcatttgtggtaatattgttggcagtcgcagctacagcagtactctgcaaatgggttggatctatctttcntgcccagcgatttcctcnttggcattgcttcttcctcttaccagtatgaaggagcttacaagagtgacggcaaaggactgagcaactgggataactacactcacggaccaggtagaagtgtaataatggatggaagcaatggggatatcgcgattgatcattatcatcgctacctggaggatatagat

SEQ ID NO: 5405 - DNA, 280 bp, Glycine max
  unsure (1)..(280): unsure at all n locations; Clone ID: 700560906H1
acacagtgtcagaatctgagttctttgaactcaaaccctaaaaaaaacgatgtatcgttttttgtncttccattcgccatggctgtngatcttccctcacatcacntctcnngccgaaacccacccttccattcgacgccgccctttgatntcgccgtttacctcnaaacgacggacatgttgccaggattttcaagctcgaattttgattggaggaatcttattgtgaacgagaatgtgaatgcagatgattctatgcaggatgcagagaacagaaact

SEQ ID NO: 5406 - DNA, 288 bp, Glycine max
  unsure (1)..(288): unsure at all n locations; Clone ID: 700560907H1
ctccatgctcctcttaaacncacgcaatttcagttctgaaggcggantcgcagaaatgcagggtcgcgcgtgattctgcgccggtgctggaggagttcattccgttgaagaaggagcgtggtgatcagagcnnnnnnnnnnnnnnnnnnnnnnnnnnnnnnnnnnnnnnnnncaacgaatgccgggataagaggaattggatgagttctgttcagctctggaataacaacactaccactgccaccactaataataacaacccttctgatcgcaaacaactacttcaca

SEQ ID NO: 5407 - DNA, 280 bp, Glycine max
  unsure (1)..(280): unsure at all n locations; Clone ID: 700560908H1
cttttctgcatgtttgttctctcaacgactcctccgcgaaagagtattattccaatattttggttgggttgaatcccgnggttgaagcgttgcagacatcacggctatncctaagagtgtctcgctccctcattcatgtccgatctgtacgacggangacgggtagttgcgtaactgccgttaacccttcgccgcacggtgggcgtggtgctttgccttctgaaggtggtagcccttcagacttgctcttcctcgctggtggtggtnccttctagtntct

SEQ ID NO: 5408 - DNA, 248 bp, Glycine max
  unsure (1)..(248): unsure at all n locations; Clone ID: 700560909H1
accaccctgtgatngcagactcaacactctcgctagacacttccttccgcaaatngcttctcangacagcatctccgcttctncaacctccgcntctgattccgtcttcaatcacctcgtnngnnctcncnaanatcctatnctcggggtaactnnagcttataacaaagatccaagtncagttaagctcaacttgggagttggtgcttaccgaactgaggaaggaaaacctcttgttttgaatgtag

SEQ ID NO: 5409 - DNA, 286 bp, Glycine max
  unsure (1)..(286): unsure at all n locations; Clone ID: 700560910H1
ccctgcttcagcttcagcttcatagggcttgttggcggtgtcagaatcagaagaacacaaagctcactgaatcgangcncttcattttgattttcttcctcgtcactgcgcatcatgtacagagttgcagcttcatcattcagaaggcatctcaagggccatggaggtaacttgggatccattaggttttcaacttcggccgcggtagtgcaaggacttcatctggtggtttgtttagctggcttactggagagcgttctagtgctcttcctcctcttgacatacc

SEQ ID NO: 5410 - DNA, 287 bp, Glycine max
  unsure (1)..(287): unsure at all n locations; Clone ID: 700560911H1
ataagggctttgaccccaaggatgataagggctatagctgaaagaaccaaacaaagaaaatcacgttccaaggtggacaatgtgnttcctaatgtgatgtcaatgcattcagttagcctganggttgaggcaattttgcttaaatctaaatcctctgaagaacttgggcgatacactgaggctgcaaaggagtgcagaattgttgtggatacagttgagtctgctcttcctaatggaatgcctgagggtattggtgaagattgtaagttgcaagaaatgttccacga

SEQ ID NO: 5411 - DNA, 140 bp, Glycine max
  unsure (1)..(140): unsure at all n locations; Clone ID: 700560912H1
ctccttttatcattctgttttaatgtgttgtgtttgtgngaacccctgattacatttttgttaagcgcannngttttagggctttgccgttgcgttgttggtttgctttttaaatgtcaactttatatttgtgttcaaaa

SEQ ID NO: 5412 - DNA, 168 bp, Glycine max
  unsure (1)..(168): unsure at all n locations; Clone ID: 700560913H1
ctcttctcttcttttccaaaaacaatnaaanttaggtagcaccatcaaccccaaaaanctcaaactaanccccaaaagcttctttcgtaaaaangaaccatctttagtctcacgctccgacccgccttctttcggatccggatcctcttccgttgactcttccacaca

SEQ ID NO: 5413 - DNA, 292 bp, Glycine max
  unsure (1)..(292): unsure at all n locations; Clone ID: 700560914H1
agaacagggactcactctggcagcggcactctcggtggctataatctttctgtggtgagttgtcaagatgtacacatcaaggaagaaaatccacaaggataaggatgctgagccaactgaatttgaggaatcagtcggacaggcattgtttgatctggncaataccaacaatgagctgaaaagtgatctgaaagatttatacataaactcagctgtccaaattgatgtttctgggaaccgcaaggctgtggttatccatgtcccctacagattaaggaaaggattccggaag

SEQ ID NO: 5414 - DNA, 221 bp, Glycine max
  unsure (1)..(221): unsure at all n locations; Clone ID: 700560915H1
atggaacagctgaagccaagtgctgctaactcttcccctctnactcccctcggcttcttggacagagcagccaccgtccacggcgacgtcccttncgttncttataacaacaccaccttcacgtggtcccagacgcgccgccgatgcctccagctggcctccgccctctcctcccttggtatccgccgcggcagnttcgtctccgtcgtggnccccaacat

SEQ ID NO: 5415 - DNA, 184 bp, Glycine max
  Clone ID: 700560916H1
gcacaggctctgggaaatcggtattttgactttgataaactagcagagattactgcactggtcacaacaaacctgaacaaagtaattgatgttaattactacccagttgaaaatgcaaaacggtcaaacttacggcacagaccaattggtataggagtacagggtcttgtctgatacttcatac

SEQ ID NO: 5416 - DNA, 288 bp, Glycine max
  Clone ID: 700560917H1
ttctaataatgtctagaaatagctaagcactacctttctcttgggcaaatgaataaattcattgcttggaaatgtgcagatactgggcactgggatgtctgcaaagatgtgggaagtaactgtggagcatgctcgaacttgtgtacttgatacaacgaggcacgtgtacttcccttctaattctcaagaacctggtgtggtcttcaatgctgtgggacaagtgacaggactgctttctgaatgcgattatgtcacagtagataagctgactgaaactgaaaaggcatt

SEQ ID NO: 5417 - DNA, 278 bp, Glycine max
  unsure (1)..(278): unsure at all n locations; Clone ID: 700560918H1
tgccgcttccggcaccgaacgaacagtctccggccaacttcgcntcttgcgtnncgaaaattctcggaatattttgaatccaggaaatcatgcacgctccagttctagttctcaaggactctttgaaacgagagtctggatctaaggtccgctatgctattattcaggcggcaaaggctgttgctgatgtagtccgaacaacattgggacctaggtccatgctaaanatgcttcttgatgctcaaggaggaattgtggttaccaatgatgggaatgct

SEQ ID NO: 5418 - DNA, 285 bp, Glycine max
  unsure (1)..(285): unsure at all n locations; Clone ID: 700560919H1
tagggagtctaataaatctgacagccaagtgaatggaagccctgacgttattgataaactgagttataattctgaatcatgtaatgactcaagtgacacttcagnatcatgtgntaaagatancagtatttaccaatagtggggagtctagtagtgactcacttgatgttgctgaaattcttagaaanctaagtagtaagtttaattttccccatgaaaaaattggngaagcaaggaaaaataagttttgtgttgctcggatttcaaagactaagtctataagtg

SEQ ID NO: 5419 - DNA, 285 bp, Glycine max
  unsure (1)..(285): unsure at all n locations; Clone ID: 700560921H1
acccactaaaccaccactactcctaagatctccttcaaaacacaaccaaaatcttaactttcttggaacctttttaattgtttcttctttaaaaatcaatttcctttaaggctttaactttaatattagagttctttctctttcattcatccttggtaatggcttgtgcattgcaagcaaccttagcagncaacacctatgccttttcttccaggagattctccttgaagcaccaaaagaacagtaagagaaggttttctttgttcactgttagagctgattctg

SEQ ID NO: 5420 - DNA, 284 bp, Glycine max
  Clone ID: 700560922H1
gcgacgtgtgcggcgtatcgtgcacgggtgaaggcgaggccatcatacgtggcacgctggcgcgtgaggtggcagcggtgatggaatacaaaggcttgaagcttcaagaagccgtggattttgtgatcaagcaccgtctcgatgaagggatggctggtctcattgctgtgtccaacgctggggaagtggcttatggtttcaattgcaatggcatgtttaggggctgtgccactgaaaatggcttcatggaggtcggaatctgggaatagcttcattattttcct

SEQ ID NO: 5421 - DNA, 274 bp, Glycine max
  unsure (1)..(274): unsure at all n locations; Clone ID: 700560923H1
aaacagttcctgccttcattttacangacatgatatcatgagatcaggtantatgggtttatagctttgattgtngaagangcatggcttgtntttctcnaccttgcaatactgggtcatttgctaccccaactntgactcngagaagatatttgggtgtgtgtggaggtntgtgcactaggtcattcgtcgttanttctctagggtgtaaccngtgctncaaatttcnnnatgagttngtgtggaacangnagctagggnattntggtagtat

SEQ ID NO: 5422 - DNA, 280 bp, Glycine max
  unsure (1)..(280): unsure at all n locations; Clone ID: 700560924H1
gtgcaaagtttcagtatttcccaaaaaaacagttatggatctctccgtttctttctccaaaacccgtcctcntccgttctctccctctttctgccgtccaatcactccgcaactnctgcgattctcccgaaactccggaacctttcgccgccgttgatttcccgccaaaacaagctcgcggtcacagccattcaggtttcggatctatccgagaattncgacgattctgtcctcgaagacgttccgcacctcatngaacnncantcccaatttgccggtg

SEQ ID NO: 5423 - DNA, 285 bp, Glycine max
  unsure (1)..(285): unsure at all n locations; Clone ID: 700560925H1
gccgattcaacctcaagcgattcactctcactcgacatcgattccttttctccttcacctcaggaacatatcatcagaacacgtcatggttctgtatctgttgctgtatatggagaccaggataagccagctctaatcacatatccggatttggctttaaattatgtctcctgctttcaggggttattattttgtcccgaggcatattaccttctgctccacaatttctgcatttatcatattagtccacctgggcatgagttgggagncgctgcaatcgatcaa

SEQ ID NO: 5424 - DNA, 284 bp, Glycine max
  Clone ID: 700560926H1
gttctttcgcctttggttccggttcgtgaggtgaatttcctacggttttgcaagcagcacgcagaagggttgtgggctgtggtggatgtgtccatagatagcatcagagaaagttcaggagcacccacttttgtgaacggtaggaggcttccttctggttgcgtggtgcaagatatgcccaatggttattccaaggtgacatgggtggagcatgcagaatacgaagaaagccaagttcaccagctctataggcctttgttgagctcaggcatggggtttggtgc

SEQ ID NO: 5425 - DNA, 286 bp, Glycine max
  Clone ID: 700560927H1
atgagttccccttgcagttgcgcttgcgcttctactaattggagcgttgattatggttatggaggtggtggcgtgctttcaaattcaaaggtaagaagcaggaggtccaaagaaatatccatggcacattcagtttgtggttcgagaaggtccactgcacttgtgatttcatccttgcctttcggcttccttttcctatctccgccagctgaggccagacgcaacaagaaggccatccccgaagaccaatacattactagccctgatggattgaaatactatgatt

SEQ ID NO: 5426 - DNA, 281 bp, Glycine max
  unsure (1)..(281): unsure at all n locations; Clone ID: 700560929H1
atggcataacaacaaaagtctgatgccatgagtgtaggttctcttcatcctcacaacaaccccaanctcccaaccactactataaacaccacaaactcctctcctctcttttcttgtatccacatctccaacggaagaaagaacagccangaaatcagagaaaaaaaaatgccaccttttgccggatccgaaccagttggattccctaagccagattccgacatagtttccattgacgttggtggccaactgttccaaaccacgaaacagacactaacctc

SEQ ID NO: 5427 - DNA, 295 bp, Glycine max
  unsure (1)..(295): unsure at all n locations; Clone ID: 700560931H1
ggagaggagagaagagaggaagttttggngtttgaatctatagaatagaatcaaaccaaattgaaagaagatcgattcgattcgatcgatggctctggtcggagttgaagtgaagcatgcggcggagggcgcaccggaggagaattgctccgccaagcccaccaagcagggcgagggcctccgccactactattctcacaacatccacgancatcagctccttctccgtcaaaagacgcataacctcaaccgtcttgaggctcagagaaacgagctcaattccagggtgaggatg

SEQ ID NO: 5428 - DNA, 281 bp, Glycine max
  unsure (1)..(281): unsure at all n locations; Clone ID: 700560933H1
cgatcaccatgttgcgacaaggtaggtttaaagaaaggaccatggactcctgaggaagatcagaagctcttagcttatattgaagaacatggccatggaagctggcgtgccttgccancaaaagctggacttcagaggtgtggcaagagttgcagactaagatggaccaattatctcaggcctgacattaagaggggaaagttcagtttgcaagaagaacaaaccatcattcaactccatgccctcttaggaaacaggtggtcggcaatagccacacactt

SEQ ID NO: 5429 - DNA, 284 bp, Glycine max
  unsure (1)..(284): unsure at all n locations; Clone ID: 700560934H1
agcctctactatactgcttcaccttctgctctaganaattcagtgcntccaacatggcttcggctactctctctgtagccaaaccagcccttcaggcaaatgggaaaggcttctctgaattctctggcctccgaagctcatcaggcttccttcccttttctagaaaatcttcagaggatttccattctgtcattgccttccagacctatgcagttggaagcagtggaggatatcagaagggtgtgacagaagcaaaactgaaggttgccatncagggtttggaa

SEQ ID NO: 5430 - DNA, 283 bp, Glycine max
  unsure (1)..(283): unsure at all n locations; Clone ID: 700560935H1
cacaccaaaaaattcttgcttagctctcacaaacaatctttaacaacaatgaagaaagtagtattaaaggtggacttaaataatgatagaatcaagaaaaaagctatgaagncagcatctggcctttcaggggttgaatcgatttctgttgacgttaaggacatgaaactagtcttattgggtgagattgatccagtgagtgcagtgtcaaagctacgaaagtggtgtcacactgaactaatttcatttggaccagcaaaagaggagaaggagaaggaccccg

SEQ ID NO: 5431 - DNA, 283 bp, Glycine max
  unsure (1)..(283): unsure at all n locations; Clone ID: 700560938H1
gtgtaagggcacgttctgttacatcgttcttcattttgattttggatggataaaggtaaaggtgccaaggcattagcgacctctttgcaaaatctcgatttgnatcctccatccaacgtcaaatccaagtcctccatttcaatcacccaccctcaatttcccggattactgcctatgaagacaaagcntccgagtttggtcagcctttgcattggagttcttggaagacatttggaggatattattgcagatttgagtgaaattgctatcaacttgccagctg

SEQ ID NO: 5432 - DNA, 283 bp, Glycine max
  unsure (1)..(283): unsure at all n locations; Clone ID: 700560939H1
gggttgagttcagagttgaaacttgagagagtgtcgttgattccaatttacgacggaggagtgaggaatcacaatctccaccggcgaaacctgtaactgttggcgacgctcaacactcgcactacgccgatagtgatggagagtgcttttgcaagcncctctgcgattactgaccagaggcagaagatagagcagtataagcaaatacttgctgctgtcatttcatctaatgacattgttcaggctagganattcatagatcacatgttatcagatgatgttc

SEQ ID NO: 5433 - DNA, 285 bp, Glycine max
  Clone ID: 700560940H1
tgaatgttgagatggttcatagttttgagcacgagaacgagacgaagccagagattcataagctaggaaatgagcaattgtacatggagacttcggattcggtgccaaggttgaacacggactcgagcagttcggagcacgtggtttcgcccgatgtcacgtgcgagagggaggtgcagagcgaccccaagtggaacgatgatctggacctaaagctagaaaacgcgtttgattttcagtttaattacttggacgataataacctttccgtggatgattaccttt

SEQ ID NO: 5434 - DNA, 284 bp, Glycine max
  unsure (1)..(284): unsure at all n locations; Clone ID: 700560942H1
cacaaatcaatctccaggctatctatcaagtaagaaagctgttaagaggaggagaatggctgancatggaagcaggagggaattgatattcaggtcgaagcttccggatatctacatccccaaanatatgccccnncactcttactgnttcgngaatttgagagagtgtggttcacgcccctgcctgatcaatgcccccacgggagacgtctacagctaccacgaggtggacancaccgccaganaggtggcganggggctgangnaagagggcgtggaacagc

SEQ ID NO: 5435 - DNA, 284 bp, Glycine max
  unsure (1)..(284): unsure at all n locations; Clone ID: 700560943H1
ccggtggccacacctcccgcggccactcctcctgcggctacacctcctgctgtgacaccagtgagctcgccgccagcnccngttccggtgagttctccaccagcgcctgttccggtgagcctccccctgcactggcaccgacaactccggcacccgtggtagcacccagcgctgaggttcccgctcccgctcccnnnnnnnnnnnnnnnnnnnnnnnnngtaagaagcacactgcaccagcaccgtcgccggcattgcttggccctcccgctcctccggtagga

SEQ ID NO: 5436 - DNA, 291 bp, Glycine max
  unsure (1)..(291): unsure at all n locations; Clone ID: 700560946H1
gaacagggactcactctggcagcggcacncctcggtggctataatctttctgtggtgagttgtcaagatgtacacntcaaggaagaaaatccacaaggataaggatnctgagccnactgaatttgaggaatcagtcggacaggcattgtttgatctggncaataccaacaatgagctgaaaagtgatctgaaagatttatacataaactcagctgtccaaattgatgtttctgggaaccgcaaggctgtggttatccatgtcccctacagattaaggaaaggattccggaa

SEQ ID NO: 5437 - DNA, 291 bp, Glycine max
  unsure (1)..(291): unsure at all n locations; Clone ID: 700560947H1
ttggtttggtgtttttcttaagcttgagatcaggaattaatttcagaggttcagagaatggcaacggattcttctaatggtaatggacatcaccaaacaacaacaaagccncctcctttgccgtctcccctgcgcttttccaaattttttcagtccaacatgagaatcttggttactggaggagctggattcattgggtctcacttagttgacagattgatggaaaatgaaaaaaatgaggtaattttgctgacaactacttcactggatccaaggacaacctcaaaaaat

SEQ ID NO: 5438 - DNA, 292 bp, Glycine max
  unsure (1)..(292): unsure at all n locations; Clone ID: 700560948H1
attttagaagaataccccctcttttgctgcatcagaggagttgtaaattaagagcatggctgcacaagctcttgtatcatcatcttctcttaccttctcagcggaggctgcaagacaaagtcttggaccaagatcactccaatctccatttggcttctccagaaaagcctcctttcttgtcaaggcagctgctaccccccctgtcagncaaggntcagacagacctttgtggtttgcatcaaagcaaagtctttcttacttggatggcagccttccgggtgactatggattt

SEQ ID NO: 5439 - DNA, 284 bp, Glycine max
  unsure (1)..(284): unsure at all n locations; Clone ID: 700560949H1
cgcacacgccacgcacaacacaatctcagctccagccttcttcttcttttcttttttttctctcccttccgcacccaagagagagaaagacgctgctagagaagaagaatatggcgggtgctgctcccaaacaattgttcggattcggagttgtggcgatgctcgccactctcattcttgctctctttatgcccgccgctgttcaggctcaatcngcatcccctgcacctgcanctactagcgacgggacctcccttgatcaagggatagcatatgtgttgatg

SEQ ID NO: 5440 - DNA, 283 bp, Glycine max
  unsure (1)..(283): unsure at all n locations; Clone ID: 700560950H1
atggantctacattgctccagcttttatggncaagcttgtngtncncatnttccaagaacttcatgaccctgcccaacatcaaggtncctctcatncttggtatctggggaggcaagggannangaaaatctttccaatgtgancttgtctttgccaagatgggaatcaaccccatcatgatgagtgctggagagttggaaantggaaatgcagganagccagcaaaactgntcaagcagagataccgtgaagctgcagacatgatcaagnatggaaagatgt

SEQ ID NO: 5441 - DNA, 272 bp, Glycine max
  unsure (1)..(272): unsure at all n locations; Clone ID: 700560953H1
ctttccaagattgatatctggaaagtagtaattagcacctccattctattantaattaattatgccaaggaagtagtcttgcattcatgtccaagtgaaaggttgttcttgtctacaacacacctaagccaagccactgcagctacctataccatttgggaagatttatgaatncgggaattgtgtaaatgttgtgtcatcattagttgtttctgtaaaagtcaataaaatttctaagtcgtatataagacatatggtntttcaacgatana

SEQ ID NO: 5442 - DNA, 254 bp, Glycine max
  unsure (1)..(254): unsure at all n locations; Clone ID: 700560957H1
ggaagaacnangttatngagatggtttttacgaggagtgatgttnctgttgtcgggatntgggggattngtnggtccgggaaaaccactcttgctagagaagtctgcagagatgaccaagtgagatgttatttcaaggagaggatcttgtttttgactgtgtcacagtccccgaatctggagcagctganagcgaggatctggggaacgtcatgggcaaccaaggtttgaatggcantatgcggntccacaaac

SEQ ID NO: 5443 - DNA, 284 bp, Glycine max
  unsure (1)..(284): unsure at all n locations; Clone ID: 700560958H1
gggagagganaaagagnagcntaagaatganaccgagaagaagcncgaggaggccgccgcagcccccaagaaagangacggacccatccctgtcgtntacaaactcgacttgcattccgagggatgcgtcaagaagatcaaacgcacatgtcgccacttccaaggtgtggaaaccgttaaggcagatctatcgtcgaacaaagtgactgttaccggcaaattggatgccgagaagctgcgagataagatcgccgagagaaccaagaanaaggttgacatcatct

SEQ ID NO: 5444 - DNA, 288 bp, Glycine max
  unsure (1)..(288): unsure at all n locations; Clone ID: 700560959H1
anaaacnttcccttctcttctcancnccacanncccatctnacncacccctcgcatncaacaatgtcctctgaccatnaccctccaaccttctccaancccgcngccctcngcnccaaantaagcncaaagctaaggtccgncgccacaaccaccatcgtctgnnnnnnnnnnnnnnnnnnnnnnnnnnnnnnngtgtcctccgacctgaaggcgttctccgccgcgctggnnctctcntccatcctcctctccgnccctctncncgnnggcgccganatctcggggc

SEQ ID NO: 5445 - DNA, 275 bp, Glycine max
  unsure (1)..(275): unsure at all n locations; Clone ID: 700560961H1
tcttgtaactcagatgggttcaaggatgaaaacagcagtatttgaagngnnaacangcanngctctgaaganatggnacatggatgcnnnnnnnnnnnnnnnnnnnnntgtnggaacagtgacactaggaaagtcgagtgcacgcntcntggatggaagccccattggcaattcttcnacagtgcactcctccnctgtgcccacactacaccgtngcaaaactaccggccantcancaacntacgaagatcangatcatgatcatgancatgact

SEQ ID NO: 5446 - DNA, 291 bp, Glycine max
  unsure (1)..(291): unsure at all n locations; Clone ID: 700560963H1
tgttttttcaattcagattcagnaggagacgntggnagaacccgtgaaggaacagcccctctctgctgggaactctgcgcgacccaagcttcagagatacgcgcttcgttcgtcctctaaatccaaggaaaacaagcaagacaccgcacccgatctctccatttcttctgaatctaagagggggttaagtactccacacgtaagcagaagaagtaggtggtcttgatttctctggcaacaaggataagtctactagtgctaaaccaccaagaaggctctcnaatcctgtga

SEQ ID NO: 5447 - DNA, 277 bp, Glycine max
  unsure (1)..(277): unsure at all n locations; Clone ID: 700560967H1
atggtttctcagaagaagcctttcactgtagccacgctcttcttcctggcattgttccttannnnnnnnnnnnnnnnnnnnnnnnnnnnnaccagaacaattatntcanccactccctccatccactcagatctctacnncntcctcnaacctntttctcngcctccgnncccacagccacagcaancagactcntcctnctccttcaccagcactgaaacccaacctgagcctgtnggtgacattgacgatgccacggacaatgtcaccgatgccg

SEQ ID NO: 5448 - DNA, 280 bp, Glycine max
  unsure (1)..(280): unsure at all n locations; Clone ID: 700560970H1
ccccattctcctcttctactctttctctgatgataacttcanaacaatatctcacangctgaaggcttctttatcacaagtcctcactctctaccacctcntttgcngaacactgagaggcaattcagccgttgagtgcaacgaccgagggcattctttacaccgaatctngagtctccgttganctctcanacgttgtgaagaaccctcatcttcaagagatcaacgaacttttcccgtntgatccctacaaccctgcnaggganacactggaagggng

SEQ ID NO: 5449 - DNA, 279 bp, Glycine max
  Clone ID: 700560971H1
aattagcacactgattaacccctagtgtatgatagttcaattcacgcttacttgccgcatgatcgactgtggatcaagcaacgaacattccaacatttgaagaaattagcacactgattaacccctaaactattggcaatttaatgtaaagaaaatcgcaaaggctcgacctttctgttatgtgggctatgctccgttggctacgtaatatgaatactgcaaatgctggcacgtaattataatatcaacagctggtactgctttagtttcataaacaaa

SEQ ID NO: 5450 - DNA, 285 bp, Glycine max
  unsure (1)..(285): unsure at all n locations; Clone ID: 700560973H1
aaaacaacaaancctatcttcttctttttccactttccctcagaacacctcttagatttagctgtttccaatncgtttcgaccaaaacccattaaccccttttgcagnaaagcaagattgtgctctctgcaagggtcaacgagtgtgaaaagcagaaaaagtttggtgctttgtgctaccaacatgactatagcagaggatagtttgttgcaggtggtggaggaggaagagggtcctcctgattttgctttgcttgatcctgaggacanttctaggcctcgtaga

SEQ ID NO: 5451 - DNA, 279 bp, Glycine max
  unsure (1)..(279): unsure at all n locations; Clone ID: 700560974H1
ctcgngcctaggaagangntgcataacttgcacaaacaaagcaaccctatgtcgnangggngnttgtntcaccggagccnntggcgccttggancnntgggggccctcctcctcncccagcgtngttatacggtccatgccancgtccnnganatcaaggatgaaaatgagacgaaacatttggagganntggaangagcaaagagtcgtctccatttttttgaaatggatcttcttgacatcgactccattgccgctgcnataaagggttnctccggc

SEQ ID NO: 5452 - DNA, 279 bp, Glycine max
  unsure (1)..(279): unsure at all n locations; Clone ID: 700560975H1
gtttgtttcctctaccatccaattacgcttctcctctgcctctacgtaaataaaaatatggctctcatattccaagccaataaccccaaaaaaccaatggcatcgctaacagcggggtttcaccgccacaacaaccaccgcanccattcttcttctgcgtccaaaatcntaatcttcttctgcctctctgcctttctcggcctcgccatcatcgccaacctcttccgcgcctccctctcnactcantatctctccntggcaccaactgggtgncacaag

SEQ ID NO: 5453 - DNA, 270 bp, Glycine max
  unsure (1)..(270): unsure at all n locations; Clone ID: 700560976H1
gtctctaatatttttctcactgtcttgtctctccagagaactgtatagagagagatggcagctgcaacatctggtgctgtgttaaatgggttgggatcttccttcttgagtggaggaaacaggagccaaacccttctggccactgctattggaggcaaannnnnnnnnnnnnnnnnnnnnnnnagtcctagaagactcattgtggtagctgctgctgcaccaaagaagtcatggctccctggtgtcagaggtggtggcaacctcgtcgac

SEQ ID NO: 5454 - DNA, 291 bp, Glycine max
  unsure (1)..(291): unsure at all n locations; Clone ID: 700560979H1
aacaaatcaaagccatggccacctccaacttctctattgttctctccgtctccctagccttctttttggtgctacttaccaaggcacactcgaccgataccgtttcnttcaccttcaacaagttcaacccagtccaaccaaacattatgctccaaaaagatgctagtatttcatcctctggggtgttacaactcaccaaagttggcagcaacggcgtgcccacctcgggatctctcggtcgtgncctttacgctgccccaatccagatttgggacagcgaaaccggcaagg

SEQ ID NO: 5455 - DNA, 121 bp, Glycine max
  unsure (1)..(121): unsure at all n locations; Clone ID: 700560980H1
aaanagattttatacagaaatatncgtnttcattcacatagaattcaaccanaataaatgtgatannatctaaannaggngnaaaattgaattttggntnggtttatattantngttctaa

SEQ ID NO: 5456 - DNA, 184 bp, Glycine max
  unsure (1)..(184): unsure at all n locations; Clone ID: 700560981H1
caggattgtaaaactataccttcatgctgtaatggttgtnatgtttcggactggtatagctagcggttgatgtttaatgaatcaccaccattgcacatatgtgcaaattttgtgctgagccaaatgtatgtatgtacagtatcaagccttgaaaatttacttaaattggtagcacttcttctcc

SEQ ID NO: 5457 - DNA, 278 bp, Glycine max
  Clone ID: 700560982H1
ggaggaagaagaaggactattaaagaaattgaagagtaacgaggtgtttgagcaagaagaaggcgtaatcgcgctgagaaagatcacgaggaacaaagaggatgctagggtttcgctctgcacgccgcgggtgttactagcgctgcgtggtttgatcgcctcgcgatacggcgttgtccaggtcaacgcggtggcgtctctggtcaacctttcgctagagaagcagaacaaggtgaagattgttaggtcagggtttgttccgttcttgattgatgttt

SEQ ID NO: 5458 - DNA, 167 bp, Glycine max
  unsure (1)..(167): unsure at all n locations; Clone ID: 700560985H1
ctaactaagcttcactgtttctcattatcatcatcttcctccttaattcaatttnagaacccttcctgttcctttcttcacttcccaattcantgaacacccaaaccccaatactcacgtgcttgccacgtgtcccttgaaattaccctttttttcttcttcttcca

SEQ ID NO: 5459 - DNA, 279 bp, Glycine max
  unsure (1)..(279): unsure at all n locations; Clone ID: 700560987H1
caaatcaaagccatggccacctccaacttctctattgttctctccgtctccctagccttctttttggtgctacttaccaaggcacactcgaccgataccgtttctttcaccttcaacaagttcaacccagtccaaccaaacattatgcnccaaaaagatgctagtatttcatcctctggggtgttacaactcaccaaagttggcagcaacggcgtgcccacctcgggatctctcggtcgtgccctttacgctgccccaatccagatttgggacagcgat

SEQ ID NO: 5460 - DNA, 276 bp, Glycine max
  Clone ID: 700560988H1
aattagcacactgattaacccctagtgtatgatagttcaattcacgcttacttgccgcatgatcgactgtggatcaagcaacgaacattccaacatttgaagaaattagcacactgattaacccctaaactattggcaatttaatgtaaagaaaatcgcaaaggctcgacctttctgttatgtgggctatgctccgttggctacgtaatatgaatactgcaaatgctggcacgtaattataatatcaacagctggtactgctttagtttcataaac

SEQ ID NO: 5461 - DNA, 98 bp, Glycine max
  Clone ID: 700560990H1
tggaagccttgttgtgagtaagagaaaaggcttcctgcaccgagcacaccaacttgatacctctgattctttctttgcttagaattccacacaacata

SEQ ID NO: 5462 - DNA, 279 bp, Glycine max
  unsure (1)..(279): unsure at all n locations; Clone ID: 700560991H1
gtttctattcctcactaggagctccttcnccactggttcttcatctgcatgcacacagttgcatagttttggaaaccaagaattcctgaagaagggtagcatcaacaagcagttctgaaaatggagatcaccaatgtcagtgagtatgaggctattgcaaagcagaagttgccaaagatggcgtttgactactacgcatctggtgcagaggaccagtggactctgcaagagaacagaaatgccttttccagaattttgtttcggccagtattcttattg

SEQ ID NO: 5463 - DNA, 282 bp, Glycine max
  unsure (1)..(282): unsure at all n locations; Clone ID: 700560993H1
aattgaaaacagcgctgngccttcgtgttgctctgatttgaattttgaaacaatggaaaagaaatcacctgaaccacccgaagaagcatcacagtcacgagactcatcgcgagataaccagacctggataactgcacaaaacattctnncnganaaactgatcacagaggactgtttcgcatgnnaattacaagctggttccaaagaggaagaagcattgagatacgttggtggggttgacaaaagctactcaaaggatgaccatcaagggcatgtggcacc

SEQ ID NO: 5464 - DNA, 285 bp, Glycine max
  unsure (1)..(285): unsure at all n locations; Clone ID: 700560995H1
aaatacctgaagccatctgttgctggttttcttttgcaaaaggaacttgattaccttgttggggcagtatcaaaccccaaaaggccatttgctgccattgttggtggttccaaagtctcatctaaaattggagtgattgagtcacttttagaaaaagttgacatccttcttcttggtggaggaatgatcttcacattttanaaggcacaaggtctttcagtgggttcatcccttgtagaagaagataagttggatcttgctacatcactacttgcaaaagccaag

SEQ ID NO: 5465 - DNA, 277 bp, Glycine max
  unsure (1)..(277): unsure at all n locations; Clone ID: 700561001H1
aaattacatagcctcagtaatctgagagagaaacaaaaacaatgaaggtttccattgccaagttccactcccttcccctatncnttttccttctcttggccttcaacacaaaacccctccnagcagcagaaccagagccagtggttgataagcaagggaaccctttggagccaggagtagggtactacgtgtggccactttgggctgatgaaggaggcctcacactaggccaaacaaggaacaagacatgcctctttatgttatccgtgacccttca

SEQ ID NO: 5466 - DNA, 279 bp, Glycine max
  unsure (1)..(279): unsure at all n locations; Clone ID: 700561003H1
ctcaccgtggctcttctccattgtcgttntgcttctcccttcttccttcccattcaaaccctaatctgtccctccggatcccaaaattgccccaaattgagaacacgccatggcggcaacgttcgattcggttcgttccctcgcacttctcactcttgcatttgtgtgtagcgtcgcgaattcgatgcggttcgagcttcaatcgggtaacaccaagtgcatttcagaagacattaagaccaacgcgatgagtgtgggaaagtacagtgttgttaatcc

SEQ ID NO: 5467 - DNA, 278 bp, Glycine max
  unsure (1)..(278): unsure at all n locations; Clone ID: 700561004H1
attggagatcccttgaagcagaaaagactcatncttttgataaaattacacatgctatccgatcatctatagagagtcaagaaggaatccatgatctagcctactggctttcaacaacatcaacacttctgttttatctacaatgtacaatgaaggccagcaatacaactaaggcagtgtcacgtaatcgaaactcgcccgcctctttgtttggcaaaatggcacaaggtttacgttcatcttcaatgggcttggggatttcaagtggctacagtgga

SEQ ID NO: 5468 - DNA, 278 bp, Glycine max
  unsure (1)..(278): unsure at all n locations; Clone ID: 700561005H1
ctttcttcaattccattgttgtttggttcccttcactctcacaatgcgaatcctcgtcctgctntctctcgccacccttctcctcttctcctccttctctcccaccttctgcgaccacctcgccgacgacgaggancctcagcttcctcgacgagccctccgccgcgccggagcacgaccaccactacggcgccgatgactccaatttcggnnactttgaggacttcgaggaggacgacgcggaggcgtacaagcagcccgaggtggacgagaaggac

SEQ ID NO: 5469 - DNA, 277 bp, Glycine max
  Clone ID: 700561006H1
ggaatttggatagtattagcttttcagattggtttttatccaaaggtggcacacgcatgagtattacaaaaatgtgggatccagttgcctatgcccttgggtttatcgactgtgataatatcagtgctcgctgcatgctcaccatatttgcattgtttgccacaaagaccgaggcttcccttttgcgaatgctgaagggttcaccggatgtttatctgagtggccccatccgaaagtacatcatggacagagggggcaggttccatcttaggtgggg

SEQ ID NO: 5470 - DNA, 277 bp, Glycine max
  Clone ID: 700561007H1
aaactttatcatcagagataagtgaagatgaagcagtgagatctggttcagaaagtataaaagaaaatggtaatatgaattttcacgggtctgaaaatgctgggaacaagcaacatcaaaacattgcttcaaatggcaactctagcagtagtggaactaacatggatggtgagaaaacctttagcattttgtttcggggaagaagaaatcgaaagcagactctgagaatgccaataagtttgcttactcgacctaatggctcacagtcatttaaggt

SEQ ID NO: 5471 - DNA, 275 bp, Glycine max
  unsure (1)..(275): unsure at all n locations; Clone ID: 700561008H1
ggagaatcgggttcctggatttggcactacaatgaacattctctatggggatggtgtttgtggacaaggtgatgtggactcaatgaacaatattgtttcccattancctgtattatcttgaccttcttggtgttggtcgagaacaggctgggccccatgacatccttacatgcgctgagcaggttcctttcaacccatcttccaaacctgcttcatcatcttaagattattatatttattagcatataatattgttgtgccaatccctttgaaag

SEQ ID NO: 5472 - DNA, 274 bp, Glycine max
  Clone ID: 700561009H1
ggtcattggccatgttgactctgggaagtcaaccaccactggccacttgatttacaagcttggaggtattgacaagcgtgttattgagaggtttgagaaagaagctgctgagatgaacaagaggtcattcaaatacgcctgggtgcttgacaagcttaaggctgagcgtgagagaggaattaccattgatattgcattatggaagtttgagaccaccaaatactactgcactgttattgatgctccaggacatcgtgatttcatcaagaacatg

SEQ ID NO: 5473 - DNA, 273 bp, Glycine max
  Clone ID: 700561011H1
gcaaagctcatccttgagttaaaaaatggcagcagcttcttccatggctctctcatccccatccttggctggcaaggccgtgaagctgggcccatcagccccagaagtgggaagggtgagcatgaggaagaccgtcaccaagcaggtctcctcaggaagcccatggtacggcccagaccgagtcaagtacttgggcccattctctggcgagcccccgtcctacctaaccggtgagttcccaggcgactacggctgggacactgctgggctttc

SEQ ID NO: 5474 - DNA, 274 bp, Glycine max
  unsure (1)..(274): unsure at all n locations; Clone ID: 700561012H1
caccattctcacaaaacaactttcaaactctganaaagaatggctgccaacacattgatgagtactgctatctcagccttcccatctctcctttcttcctcaaaatccagatttgccaccgcagttcctctttctagctttggtgtcaccaatgcctcttcttctcgcttttctatgagtgctgactggatgccaggccagcctagacctccttaccttgatggttcagcacctggtgactttggattcgaccctcttcgtcttggtgaagtac

SEQ ID NO: 5475 - DNA, 274 bp, Glycine max
  unsure (1)..(274): unsure at all n locations; Clone ID: 700561013H1
ctttgcttacagttcctataattttnnttctccattagattaccaagctctgcaactttgcttctcaacatggagtatcgtctcctacccatttttactttactcaatattgcactggtggcaacccatgctgctttaccccctgaagtttactggaagtcggtgcttcctactacgccaatgccaaaagccatcactgatatcctttactctgattgggtggaagagaaaagcagctcagtgcatgttggaggtggaggcgtgaacgtgcata

SEQ ID NO: 5476 - DNA, 281 bp, Glycine max
  Clone ID: 700561015H1
tgttgatcgagataactagaaacagtgtgatgaaaatgaaggtccttgttttcttcgttgctacaattttggtagcatggcaatgccatgcgtacgatatgttccctctccgaatgaacactggctatggtgcccgtactccggaggtgaaatgcgcaagttggaggcttgctgtggaagcacacaacatctttggctttgagaccattcctgaagagtgcgttgaagcaacaaaggaatacatccatggcgaacaatatagatcagactccaaaacagtt

SEQ ID NO: 5477 - DNA, 282 bp, Glycine max
  unsure (1)..(282): unsure at all n locations; Clone ID: 700561017H1
catgcntgcatgggttgaanggcaggtgaagaatcccatcccggagaagtgagcanagtgtaatacacgcagttggtattgaaaaaaacaacaagagtgaaagagaaganaanacaggnatgaataaaattgtataacaaagagtttgtttctcttatgtgaaaatgcgtagaggaggtgagggagagaacatggcagtgcctcaactaacttcaagttcgagcacgagaagattgagcctgagaacaacgagaccagacccttcttgtcactgtgcaaatg

SEQ ID NO: 5478 - DNA, 215 bp, Glycine max
  unsure (1)..(215): unsure at all n locations; Clone ID: 700561018H1
gaaatgggtaaggggggaatgtcaattgatgaacatggagaaggcaaagaagagaatatggctgcttggcttgttggaatgaacactctcaagattcagcctttcaagcttcctactttgggaccccatgatgtcagagttagaatgaaggctgttggtatctgtgggagtgatgttcactacctcaagacactgaggtgtgctcactttatant

SEQ ID NO: 5479 - DNA, 276 bp, Glycine max
  Clone ID: 700561020H1
ctggcagcaacttgcttcagtggcctgttgctgaggtggagagtttgagattgagaagtgatgaattcaaaaatttgaaggctaaaccagggtcagtcgtgtcaatagatattgaaacagccacacagttggacatttgccgagtttgagatagacaaggaaacccttgagaaaacacctgaatccaacgaggagtacacgtgtggcaacagtggtggatctaaacaacgtggtgccttaggaccttttggtcttttggttttggcagatgagggc

SEQ ID NO: 5480 - DNA, 277 bp, Glycine max
  unsure (1)..(277): unsure at all n locations; Clone ID: 700561022H1
gtttctattcctcactaggagctcctntccactggttcttcatctgcatgcacacagttgcatagttttggaaaccaagaattcctgaagaagggtagcatcaacaagcagttctgaaaatggagatcaccaatgtcagtgagtatgaggctattgcaaagcagaagttgccaaagatggcgtttgactactacgcatctggtgcagaggaccagtggactctgcaagagaacagaaatgcctttnccagaattttgtttcggccacgtattcttat

SEQ ID NO: 5481 - DNA, 116 bp, Glycine max
  Clone ID: 700561023H1
attaatggcagctgcaagtagcatcatctccatctcctctgcttcactctttactccaacaacaacccaatggctcctcaaacacaattacaaggaccatgatcatgttcatgttc

SEQ ID NO: 5482 - DNA, 275 bp, Glycine max
  Clone ID: 700561024H1
gagataactagaaacagtgtgatgaaaatgaaggtccttgttttcttcgttgctacaattttggtagcatggcaatgccatgcgtaacgatatgttccctctccgaatgaacactggctatggtgcccgtactccggaggtgaaatgcgcaagttggaggcttgctgtggaagcacacaacatctttggctttgagaccattcctgaagagtgcgttgaagcaacaaaggaatacatccatggcgaacaatatagatcagactccaaaacagtta

SEQ ID NO: 5483 - DNA, 273 bp, Glycine max
  unsure (1)..(273): unsure at all n locations; Clone ID: 700561025H1
ccctcttggcttgtgaatcagcaccacattcacctgagctttttgtgnggattccaaagcatggcttcccttgcagcatccactgctgctgcttcccttggcatgtcagaaatgcttggaaaccccatcaacctcagtggtgccacaaggccagctccatctgcctctagccctgcctccttcaagactgtggctcttttctccaaaaagaaggctgcacctccaaaaaaagctgcagctgctgctcctgccaatgatgagcttgccaagtgg

SEQ ID NO: 5484 - DNA, 272 bp, Glycine max
  unsure (1)..(272): unsure at all n locations; Clone ID: 700561026H1
gcagaacattctttgtttcgctctcgcntttcaggtccaacaacgccgaaganncaagaagattgtgtctccgattattatttgaagatttctgaaacaccagagtgtttctgatcatcgtcgtcgctgatctctgtttcctccgttactgtttctgattgcagaggcgaaaaggttttccgcatcaaaatcgaatnttgtttgctccatcatcaccatgggtagaatcacgaaactgggttttcttcttctacccagataagtaaaagggt

SEQ ID NO: 5485 - DNA, 173 bp, Glycine max
  Clone ID: 700561027H1
gtgagtttgttgatcgagataactagaaacagtgtgatgaaaatgaaggtccttgttttcttcgttgctacaattttggtagcatggcaatgccatgcgtacgatatgttccctctccgaatgaacactggctatggtgcccgtactccggaggtgaaatgcgcaagttggag

SEQ ID NO: 5486 - DNA, 273 bp, Glycine max
  unsure (1)..(273): unsure at all n locations; Clone ID: 700561028H1
gacttgctctgcctctgccactctctgagtaggactacactgccatngctgcctcagtctccactgttggagctgtcaacggagctccactgagcttgancagctctggagctggagcttcagttcccagttcagccttctttggcaccagcttgaagaaggttattgcctcaagggtccctaacgtcaagatttcttctggaagtttcanaatcgttgccgcggaaaaagagattgatgaganacaacagacagacaaggacagatggnang

SEQ ID NO: 5487 - DNA, 279 bp, Glycine max
  unsure (1)..(279): unsure at all n locations; Clone ID: 700561029H1
attttagaagantaccccctcttttgctgcatcagaggagttgncaattaagagcatggctgcacaagctgcttgtatcatcatctnctccttaccttctnagcggaggctgcaagacaaagtcttggaccaagatcactccaatctccnaatttggcttctccagaaaagcctcctttcttgttaaggcagctgctaccccccctgtcaagcaaggatcagacagacctttgtggtttgcatcanagcnaagtctttcttacttggatggcagccttc

SEQ ID NO: 5488 - DNA, 88 bp, Glycine max
  unsure (1)..(88): unsure at all n locations; Clone ID: 700561032H1
gtatttngctcaagtagggttgttgcngcatctgcatctcanagtttgcatgctcanatggttgnccacttggtcagtactttgatgt

SEQ ID NO: 5489 - DNA, 175 bp, Glycine max
  unsure (1)..(175): unsure at all n locations; Clone ID: 700561035H1
ctcgagcggttttcgtgttcggtnagatggaaganaggangcantcgcgttatgtgaagttgactaaagatcagacacctcncgaagatattacccctggcgaactcaatcagccaattcaggttcctcagttggatgttcgtaagtgccctgaatgtagacagccgctacctga

SEQ ID NO: 5490 - DNA, 87 bp, Glycine max
  unsure (1)..(87): unsure at all n locations; Clone ID: 700561039H1
ctgaancagagccaatcccgntgctgtntcccttgttttgaacacccttcntgtggatatncttttgttaaaggccaattgnntntt

SEQ ID NO: 5491 - DNA, 274 bp, Glycine max
  unsure (1)..(274): unsure at all n locations; Clone ID: 700561040H1
cagcaccacattcacctgagctttttgtgaggattccaaagcatggcttcccttgcagcatccactgctgctgcttcccttggcatgtcaganatgcttggaaaccccatcaacctcagtggtgccacaaggccagctccatctgcctctagccctgcctccttcaagactgtggctcttttctccaaaaagaaggctgcacctccaaaaaaagctgcagctgctgctcctgccaatgatgnccttgccaagtggtatggtcctgacagaagga

SEQ ID NO: 5492 - DNA, 251 bp, Glycine max
  unsure (1)..(251): unsure at all n locations; Clone ID: 700561041H1
tggncttccgaagaatcccacaacaagccccccagcgagcagtccactaccgaactcatcacgagcgcgaantggtggcggaggcggcgcagtcggctctgaagagcgacagcancaaagtggacaaggccaaggtggctgacgctgccggcgatcttctcgacgcggcggggaagtatggaaaacttgatgacaaacaaggcatagggcaatatgttgacaaggctgctgattatctgcataattaccag

SEQ ID NO: 5493 - DNA, 86 bp, Glycine max
  unsure (1)..(86): unsure at all n locations; Clone ID: 700561042H1
cactaaacaaaaaaataaagaaaaattncaccaaaatgccttcttcttccaccnnccnancnacgancnaaaacgtgatgccacnc

SEQ ID NO: 5494 - DNA, 271 bp, Glycine max
  unsure (1)..(271): unsure at all n locations; Clone ID: 700561043H1
cacaccaaaaaattcttgcttagctctcacaaacaatctttaacaacaatgaagaaagtagtattaaaggtggacttaaataatgatagaatcaaganaaaagctatgaagacagcatctggcctttcaggggttgaatcgatttctgttgacgttaaggacatgaaactagtcttattgggtgagattgatccagtgagtgcagtgtcaaagctacgaaagtggtgtcacactgaactaatttcatttggaccagcaaaagaggagaagg

SEQ ID NO: 5495 - DNA, 176 bp, Glycine max
  unsure (1)..(176): unsure at all n locations; Clone ID: 700561045H1
cttcctctttttctcaaccanaaggggttcaattctagctagttctattacatcgttccgcnaccatgaacatggtcgatcgtncttcnctncatggttttcgcagtttcatcagctttagacatgtcaataatatcacatgacaacgctcatgcggatagggccacgaggcgcac

SEQ ID NO: 5496 - DNA, 177 bp, Glycine max
  unsure (1)..(177): unsure at all n locations; Clone ID: 700561046H1
ctctgtctctctctctgcggtctcgctcttcttctcatcnancncngagttacagactcancgntcttccgattctctntcgtcttggtttatnanctcganggagagacccactcttggtggcacgcggattaagacccgcaaacganatattgctgcnccgctggaccctgcagt

SEQ ID NO: 5497 - DNA, 282 bp, Glycine max
  unsure (1)..(282): unsure at all n locations; Clone ID: 700561047H1
gagaactagaggcnagggtctcggagtgtntgggtttgtttatcttaaacaccacaaacacagaaacagaggtgtagagaagaaagctaaaaaatatggcggcagagtcatcactgagggtggcgactcccactctttgcaacctcaatgggtctcagagacgaccaaccaccaccactctctctccgcttcgcttcatgggttttcgtcctcgacnctcctctcactctctcacctcctcttccctttcacactgctnggggnccncagaantcantccgt

SEQ ID NO: 5498 - DNA, 276 bp, Glycine max
  Clone ID: 700561050H1
taagacccttcaaaatatttctcatcaaattgtttcaaacttgatcaccaaaaagtacagttcaccttacaaaaacaactttggttagtttctttgagcaggttaattgctagagatggtgttggggtggaggagaaggaagggctgcaacaataaccgccgaaaaggtggcaaatccatcacggagttggtgattcccaaccacttcaggtgtccaatttcccttgacttgatgaaggatcctgtgacattgtcaacagggataacctatgatag

SEQ ID NO: 5499 - DNA, 275 bp, Glycine max
  unsure (1)..(275): unsure at all n locations; Clone ID: 700561054H1
gcaaaagagcgtcgtagtcgcaaccctaatcagaagaagcgcanttcaagcgagtgacagccaccagccatgggtcgtatgcacagccgcggtaagggtatatcctcttctgctttgccctacaaaaggacacctcctagctggctcaagatctcttcgcaagatgtcgaagaaaatatctgcaagtttgcgaagaaaggtttgaccccgtctcagattggtgtcattctcagagattctcacggtattgctcaggtcaatagcgtcactggcag

SEQ ID NO: 5500 - DNA, 272 bp, Glycine max
  Clone ID: 700561055H1
ctaagcccttttctgtttgcaatctggagctatgagttcgtcttcggcagatgtttttccagcaattcaggaagttatgctggagttccgtgctggcaaaatgtctcttgaggaaaaaagggttgttcccgatacacggaaaggacttgttcgaattgctaggggtgaggagggattagtacattttcagtggcttgatcgcacacaaaatgttgttgaagatgatcagataatatttcccaatgaggctatttttgagaaggttaatcaaa

SEQ ID NO: 5501 - DNA, 175 bp, Glycine max
  unsure (1)..(175): unsure at all n locations; Clone ID: 700561056H1
cttgtcactgcccgtgtgtcgccgccatggccaccgtcaccacccaagcntccgccgcaattttccggccatgtacctcgaaatcgaggtttttgaccggctcttccggtaaacttaaccgggaagtnactangcngccaatgnggtgccctcctntctgcctctttcaaggttg

SEQ ID NO: 5502 - DNA, 93 bp, Glycine max
  unsure (1)..(93): unsure at all n locations; Clone ID: 700561057H1
ctctctctttntcccaattttccgantnctcctactcctccatggacgngnggctgcgattcccntccccctgccgggcgcanccaaccgttc

SEQ ID NO: 5503 - DNA, 245 bp, Glycine max
  unsure (1)..(245): unsure at all n locations; Clone ID: 700561058H1
aacctgatttgggggaggcaactgcgcccagagctctgctcgccggcgctgaagaaggaggccgtcctcctccggccatgcctcgccgccgcctcctcgccggccgagggcagtgattccgccggagaagcaaaggttgctccggcggggtttttcgagaagtatccggctcctggtgaccggattcttcttcttcacgtggtacttcttgaacgtgattttcaacatccttnacaagaagatta

SEQ ID NO: 5504 - DNA, 163 bp, Glycine max
  unsure (1)..(163): unsure at all n locations; Clone ID: 700561060H1
gattaagttggctccaacgttgtaagtattagtaggccatttccgaattatgaaggagggaattgacattcattgtgattactataatttgtttaaacggtgtcatttcttttatatnttgaaattttgttaactttgttgttgaaattttattctaatgaat

SEQ ID NO: 5505 - DNA, 281 bp, Glycine max
  unsure (1)..(281): unsure at all n locations; Clone ID: 700561063H1
cttttaagatatttttgttacatagtttatggtctacgagagccctgcctctgtagagtgtagaccaacctccttttctttgctttgagctcgctcgatcttcttccatttcatgtcttgttttatttnattttatttatttaagccttttaaatgcccaacattttgttcttgatgtttgagattgatgtattcaattctgagtgaaatcttcttttccgggtgtatgatcaattccactgtgagacgcaggncccatttagttcaatccttctctgttg

SEQ ID NO: 5506 - DNA, 93 bp, Glycine max
  unsure (1)..(93): unsure at all n locations; Clone ID: 700561064H1
caacagcacaaagcgggttactgtctgttncaagcnancattctctgctgctctctttccttagtgcctaccttgaccagaagttannatggt

SEQ ID NO: 5507 - DNA, 84 bp, Glycine max
  unsure (1)..(84): unsure at all n locations; Clone ID: 700561065H1
cgaactactccgaagccgctcacgttatccacacaacatannatanaaaaacctaagtaaccacggngntananacctgacacc

SEQ ID NO: 5508 - DNA, 276 bp, Glycine max
  unsure (1)..(276): unsure at all n locations; Clone ID: 700561067H1
ctcataacacaaagcacaaagcaaagcnccatccttgagttaaaaaatggcagcagcttcttccatggctctctcatccccatccttggctggcaaggccgtgaagctgggcccatcagccccagaagtgggaagggtgagcatgaggaagaccgtcaccaagcaggtctcctcaggaagcccatggtacggcccagaccgagtcaagtacttgggcccattctctggcgagcccccgtcctacctaaccggtgagttcccaggcgactacggctg

SEQ ID NO: 5509 - DNA, 274 bp, Glycine max
  unsure (1)..(274): unsure at all n locations; Clone ID: 700561068H1
tgtgaatcagcaccacattcacctgagcnctttgtgaggattccaaagcatggcttcccttgcagcatccactgctgctgcttcccttggcatgtcaganatgcttggaaaccccatcaacctcagtggtgccacaaggccagctccatctgcctctagccctgcctccttcaagactgtggctcttttctccaaaaagaaggctgcacctccaaaaaaagctgcagctgctgctcctgccaatgatgagcttgccaagtggtatggtcctgac

SEQ ID NO: 5510 - DNA, 274 bp, Glycine max
  Clone ID: 700561070H1
ggccaatccattgatttctttggtgcactgagggccagagtatatgatgatgaagtgaggaagtggatttcctggtgttggtgttgacagtgttgggaagaagcttgtgaactcaaaagatggacctccaacctttgagcagcccaagatgactctggagaagctcttgctgtatggtaacatgcttgtccaagaacaagagaatgtcaagagagtccaattggctgacaagtacttgaacgaggctgctcttggaaatgctaacgaggatgct

SEQ ID NO: 5511 - DNA, 172 bp, Glycine max
  unsure (1)..(172): unsure at all n locations; Clone ID: 700561072H1
ctctctttctctagtcctgttatttctcagcgcgtaaagcatggctttgttggtggagaaaaccacnagtggtcgcgagtacaaggtcaaggacctttcccaggccgacttcggcngcctcgagatcnagctggccgaggttgagatgcccggcctcatggcctgtcggacc

SEQ ID NO: 5512 - DNA, 271 bp, Glycine max
  unsure (1)..(271): unsure at all n locations; Clone ID: 700561073H1
ggcttttatcttttgactntnattattgctgacttcctctttgttttctgatctatggcttccaaggagttctactggtntttgctccttggctccttcactatctgagagtcattntgtgcactactgggttgaaaatgtatatgctggagagcaaaggaggtgccatagcatgcatgttcttgtcctcttttcttcttggggacatggcctgctcttttgactatgttagagaggcgtggtcgtcttcctcagcatacctacctngatt

SEQ ID NO: 5513 - DNA, 270 bp, Glycine max
  Clone ID: 700561075H1
gcaaacgctgccgaattcgttatcgctttgcactagcagctttgaaacccggttcatccgaagcccttcaccgaaccatgtcgaggagaaaggttagagagccaaaggaggaaaatgtgactctgggtccagctgttagagatggtgaacacgtttttggcgttgctcgcatctttgcctccttcaacgacaccttcatccatgtcactgatttgtctggcagggaaacccttgtccgaatcactggtggtatgaaagttaaagctgaca

SEQ ID NO: 5514 - DNA, 270 bp, Glycine max
  unsure (1)..(270): unsure at all n locations; Clone ID: 700561076H1
taacccctttgattctgatgaagatacaanagataacaagtataattcttctaagaagactttgaccaacaccaacccctttgatgatgatcatgttaatgccactggccactcttcatcatcttcttatggcctttcgtctacccatcgaaataggtataagaacgatttccgcgactcaggggggttggagagtcaatctgtgcaggaattggagaactatgctgtttacaaggctgaagagacgacaaattcagtgaacagttgttt

SEQ ID NO: 5515 - DNA, 84 bp, Glycine max
  unsure (1)..(84): unsure at all n locations; Clone ID: 700561081H1
ctcagtgcctccgccaaatcaaataaaatggatactganncccgttgaganccattgatgtcacagatgatgcaaggagtttta

SEQ ID NO: 5516 - DNA, 272 bp, Glycine max
  Clone ID: 700561084H1
aagtagaataccttcttaggaagggatggattccttgcttggaattcgagttggagcacggtttcgtgtaccgtgagcacaacaggtcaccaggatactacgatggacgctactggaccatgtggaagctgcctatgtttggttgcactgatgcttctcaggtgttgaaggagcttcaagaggctaagactgcataccccaacggcttcatccgtatcatcggattcgacaacgttcgccaagtgcagtgcatcagcttcatcgcctacaag

SEQ ID NO: 5517 - DNA, 265 bp, Glycine max
  unsure (1)..(265): unsure at all n locations; Clone ID: 700561085H1
tntggaagtccgcagtaagtaggtaccttcgtttgtttcagattcgattngtgnaagtacgagtaggtcactgcagttctgcgggcatagatgggtnttnggacactgagtttatccgtggtggtccnattnnaggccactaatttcaanggnttgcccccatctcggtcgtccaattcgttgccgcatctctcgttcacaaagccatctggggttgtgagaacggagtctaatattcggaagaaaagaagaaagatgccanatc

SEQ ID NO: 5518 - DNA, 88 bp, Glycine max
  unsure (1)..(88): unsure at all n locations; Clone ID: 700561087H1
ggaagccttgttgtgagtaagagaaaaggtcttcctgtcaccgagcacaccaagcttgtatagccttctggattgctttcngtgnctt

SEQ ID NO: 5519 - DNA, 248 bp, Glycine max
  unsure (1)..(248): unsure at all n locations; Clone ID: 700561089H1
cagcaatctagtatttaatgcatncctaaaataatgattcttaagagcggattcatcttcggtcattttattttgtataataaaagaaagataataaagagaataatcatattaaatattaaatagaaaaaatggcccgatcatttatcaaaggccaatcttcggtagaagagaaggttcctttggaacacttatttctatttcagtataccgggtctctttctttcatttcaaannntnnnngaatt

SEQ ID NO: 5520 - DNA, 268 bp, Glycine max
  unsure (1)..(268): unsure at all n locations; Clone ID: 700561090H1
caaagataagaggcaaaccggttaggatcagtgcaaagagaagaatgggacttggcttgtttttnctcttttatccacttggtaacttcggctattgtcgaatccgtaaggcgaaggagagcaatcaaggagggatatcttaacaatgccaatggtgtgttgcatatgtctgcaatgtggcttttcccacaactttgcttgggtggaatagctgaagcattcaatgcaataggccaaaatgagttctattacacagagtttcctagga

SEQ ID NO: 5521 - DNA, 285 bp, Glycine max
  Clone ID: 700561096H1
aaacactcataacacaaagcacaaagcaaagctcatccttgagttaaaaaatggcagcagcttcttccatggctctctcatccccatccttggctggcaaggccgtgaagctgggcccatcagccccagaagtgggaagggtgagcatgaggaagaccgtcaccaagcaggtctcctcaggaagcccatggtacggcccagaccgagtcaagtacttgggcccattctctggcgagcccccgtcctacctaaccggtgagttcccaggcgactacggctgggaca
